United States Patent Application Publication US 2024/0114883 A1 - sequence listing, part 2

SEQ ID NO: 43190 - protein, 12 aa, synthetic construct
AAWYEATGWFKI

SEQ ID NO: 43191 - protein, 13 aa, synthetic construct
AAWDLGTTGWLNI

SEQ ID NO: 43192 - protein, 11 aa, synthetic construct
AAWKSTGWFKI

SEQ ID NO: 43193 - protein, 11 aa, synthetic construct
AAWVSTGWVKI

SEQ ID NO: 43194 - protein, 11 aa, synthetic construct
AAWMATGWFKI

SEQ ID NO: 43195 - protein, 11 aa, synthetic construct
AAWDNTGWLKI

SEQ ID NO: 43196 - protein, 11 aa, synthetic construct
AAWVSTGWFKM

SEQ ID NO: 43197 - protein, 13 aa, synthetic construct
AAWDHNTTGWFKI

SEQ ID NO: 43198 - protein, 11 aa, synthetic construct
AAWVSTGWFEI

SEQ ID NO: 43199 - protein, 14 aa, synthetic construct
AAWDPLYTTGWFKI

SEQ ID NO: 43200 - protein, 14 aa, synthetic construct
AAWDRVYTTGWFKI

SEQ ID NO: 43201 - protein, 12 aa, synthetic construct
AAWDRTTGWFKI

SEQ ID NO: 43202 - protein, 14 aa, synthetic construct
AAWDPSHTAGWFKI

SEQ ID NO: 43203 - protein, 9 aa, synthetic construct
AAWPCWFKI

SEQ ID NO: 43204 - protein, 12 aa, synthetic construct
AAWVRGTGWFKI

SEQ ID NO: 43205 - protein, 14 aa, synthetic construct
AAWDPSQTTGWFKI

SEQ ID NO: 43206 - protein, 11 aa, synthetic construct
AAWVITGWFKI

SEQ ID NO: 43207 - protein, 11 aa, synthetic construct
AAWDPTGWFKV

SEQ ID NO: 43208 - protein, 11 aa, synthetic construct
AAWDPTGWFNI

SEQ ID NO: 43209 - protein, 11 aa, synthetic construct
AAWVFTGWFNI

SEQ ID NO: 43210 - protein, 11 aa, synthetic construct
AAWVFTGWSKI

SEQ ID NO: 43211 - protein, 11 aa, synthetic construct
AAWDPTRWFKI

SEQ ID NO: 43212 - protein, 8 aa, synthetic construct
AAWKGTGW

SEQ ID NO: 43213 - protein, 12 aa, synthetic construct
AAWDGGTGWFKI

SEQ ID NO: 43214 - protein, 12 aa, synthetic construct
AAWGWTTGWFKI

SEQ ID NO: 43215 - protein, 9 aa, synthetic construct
AAWPGWFRI

SEQ ID NO: 43216 - protein, 14 aa, synthetic construct
AAWDWLYTTGWFKI

SEQ ID NO: 43217 - protein, 10 aa, synthetic construct
AAWDWGYKKL

SEQ ID NO: 43218 - protein, 12 aa, synthetic construct
AAWDWGTGWFKI

SEQ ID NO: 43219 - protein, 13 aa, synthetic construct
ASWDRYTTGWFKI

SEQ ID NO: 43220 - protein, 10 aa, synthetic construct
AAWGWYYKKL

SEQ ID NO: 43221 - protein, 13 aa, synthetic construct
ASWDQNTTGWFKI

SEQ ID NO: 43222 - protein, 11 aa, synthetic construct
AAWTGPGWFKI

SEQ ID NO: 43223 - protein, 10 aa, synthetic construct
AAWDWCYKKH

SEQ ID NO: 43224 - protein, 13 aa, synthetic construct
ASWDLGTTGWFKI

SEQ ID NO: 43225 - protein, 13 aa, synthetic construct
AAWDVGTTGWFKI

SEQ ID NO: 43226 - protein, 12 aa, synthetic construct
ASWDEATGWFKI

SEQ ID NO: 43227 - protein, 12 aa, synthetic construct
AAWGYPTGWFKI

SEQ ID NO: 43228 - protein, 13 aa, synthetic construct
AAWDQSTTGWFKI

SEQ ID NO: 43229 - protein, 13 aa, synthetic construct
AAWDQNTTGWSKI

SEQ ID NO: 43230 - protein, 11 aa, synthetic construct
AAWDTTGWFQI

SEQ ID NO: 43231 - protein, 12 aa, synthetic construct
AAWDGATGWFKI

SEQ ID NO: 43232 - protein, 11 aa, synthetic construct
AAWDTTGWFKM

SEQ ID NO: 43233 - protein, 11 aa, synthetic construct
AAWDTTGWFKL

SEQ ID NO: 43234 - protein, 13 aa, synthetic construct
AAWDRDTTGWFNI

SEQ ID NO: 43235 - protein, 11 aa, synthetic construct
AAWDTTGWCKI

SEQ ID NO: 43236 - protein, 11 aa, synthetic construct
AAWDTTGRFKI

SEQ ID NO: 43237 - protein, 11 aa, synthetic construct
AAWISTGWFKI

SEQ ID NO: 43238 - protein, 12 aa, synthetic construct
AAWDEATCWFKI

SEQ ID NO: 43239 - protein, 8 aa, synthetic construct
AAWDEATG

SEQ ID NO: 43240 - protein, 12 aa, synthetic construct
AAWDEATGLFKI

SEQ ID NO: 43241 - protein, 9 aa, synthetic construct
AAWPGWFNI

SEQ ID NO: 43242 - protein, 12 aa, synthetic construct
AAWDEATGWFKV

SEQ ID NO: 43243 - protein, 12 aa, synthetic construct
AAWDEATGWFQI

SEQ ID NO: 43244 - protein, 11 aa, synthetic construct
AAWKGAGWFKI

SEQ ID NO: 43245 - protein, 13 aa, synthetic construct
AAWDRDTTGWVKI

SEQ ID NO: 43246 - protein, 13 aa, synthetic construct
AAWDGDTTGWFKI

SEQ ID NO: 43247 - protein, 13 aa, synthetic construct
AAWDRDTTGLFKI

SEQ ID NO: 43248 - protein, 12 aa, synthetic construct
AAWENTTGWFKI

SEQ ID NO: 43249 - protein, 14 aa, synthetic construct
AAWDWVYTTGWFKV

SEQ ID NO: 43250 - protein, 12 aa, synthetic construct
AACDWTTGWFKI

SEQ ID NO: 43251 - protein, 12 aa, synthetic construct
AAWDYTTGCFKI

SEQ ID NO: 43252 - protein, 10 aa, synthetic construct
AALDWYYKKL

SEQ ID NO: 43253 - protein, 13 aa, synthetic construct
AAWERDTTGWFKI

SEQ ID NO: 43254 - protein, 11 aa, synthetic construct
AAFYTTGRFKI

SEQ ID NO: 43255 - protein, 14 aa, synthetic construct
AAWDWVYTTGWFKK

SEQ ID NO: 43256 - protein, 11 aa, synthetic construct
DAWDTTGWFKI

SEQ ID NO: 43257 - protein, 10 aa, synthetic construct
AAGGGYYKKL

SEQ ID NO: 43258 - protein, 11 aa, synthetic construct
AAFYTTGWFKT

SEQ ID NO: 43259 - protein, 11 aa, synthetic construct
AAWENTGWLKI

SEQ ID NO: 43260 - protein, 14 aa, synthetic construct
AALDPSHTTGWFKI

SEQ ID NO: 43261 - protein, 15 aa, synthetic construct
AAWEHTPWTTGWFKI

SEQ ID NO: 43262 - protein, 12 aa, synthetic construct
AAGDEAPGWFKI

SEQ ID NO: 43263 - protein, 13 aa, synthetic construct
AAWDYNTTGWFKI

SEQ ID NO: 43264 - protein, 10 aa, synthetic construct
AAGDWYYKKL

SEQ ID NO: 43265 - protein, 12 aa, synthetic construct
AAGEHTTGWFKI

SEQ ID NO: 43266 - protein, 13 aa, synthetic construct
AAGALGTTGWFKI

SEQ ID NO: 43267 - protein, 12 aa, synthetic construct
AAWEYTTGWVKI

SEQ ID NO: 43268 - protein, 12 aa, synthetic construct
AAWDYTTGWFKV

SEQ ID NO: 43269 - protein, 11 aa, synthetic construct
AAWETTGWVKI

SEQ ID NO: 43270 - protein, 11 aa, synthetic construct
LLRGGVIIRNS

SEQ ID NO: 43271 - protein, 8 aa, synthetic construct
AAWDYTTG

SEQ ID NO: 43272 - protein, 11 aa, synthetic construct
DAWKGTGWFKI

SEQ ID NO: 43273 - protein, 12 aa, synthetic construct
AAWDYPTGLFKI

SEQ ID NO: 43274 - protein, 12 aa, synthetic construct
AAWDYTNGWFKI

SEQ ID NO: 43275 - protein, 12 aa, synthetic construct
AAWDYGTGWFNI

SEQ ID NO: 43276 - protein, 10 aa, synthetic construct
LRGKPLVGSR

SEQ ID NO: 43277 - protein, 12 aa, synthetic construct
AAWGITTGWFKI

SEQ ID NO: 43278 - protein, 12 aa, synthetic construct
AAWGLATGWFKI

SEQ ID NO: 43279 - protein, 14 aa, synthetic construct
AAWDWVYTTGWFEI

SEQ ID NO: 43280 - protein, 11 aa, synthetic construct
AACVFTGWFKI

SEQ ID NO: 43281 - protein, 12 aa, synthetic construct
AACDEATGWFKI

SEQ ID NO: 43282 - protein, 11 aa, synthetic construct
LRGMRPLVGSR

SEQ ID NO: 43283 - protein, 14 aa, synthetic construct
AAGDWGYTTGWFKI

SEQ ID NO: 43284 - protein, 11 aa, synthetic construct
AAIYTTGWFKI

SEQ ID NO: 43285 - protein, 11 aa, synthetic construct
AAWEITGWFKI

SEQ ID NO: 43286 - protein, 8 aa, synthetic construct
AAFGWFKI

SEQ ID NO: 43287 - protein, 12 aa, synthetic construct
AAWDYGTGWFRI

SEQ ID NO: 43288 - protein, 11 aa, synthetic construct
LRGIKIIIRNS

SEQ ID NO: 43289 - protein, 12 aa, synthetic construct
AAWEYPTGWFKI

SEQ ID NO: 43290 - protein, 12 aa, synthetic construct
AAWEHTTGRFKI

SEQ ID NO: 43291 - protein, 11 aa, synthetic construct
AAWDHTGWFKI

SEQ ID NO: 43292 - protein, 10 aa, synthetic construct
AAWDTGWFKI

SEQ ID NO: 43293 - protein, 12 aa, synthetic construct
AAWDESTGWFKI

SEQ ID NO: 43294 - protein, 11 aa, synthetic construct
AAWVFTGWFKV

SEQ ID NO: 43295 - protein, 12 aa, synthetic construct
AAGDYGTGWLKI

SEQ ID NO: 43296 - protein, 11 aa, synthetic construct
AAWKGPGWFQI

SEQ ID NO: 43297 - protein, 12 aa, synthetic construct
AAWDYPTGWFEI

SEQ ID NO: 43298 - protein, 11 aa, synthetic construct
AGFYTTGWFKI

SEQ ID NO: 43299 - protein, 12 aa, synthetic construct
AAWDYPTGWFKV

SEQ ID NO: 43300 - protein, 11 aa, synthetic construct
AAWKGTCWFKI

SEQ ID NO: 43301 - protein, 9 aa, synthetic construct
AAWPGWFKM

SEQ ID NO: 43302 - protein, 14 aa, synthetic construct
AAWDFTHTTGWFKI

SEQ ID NO: 43303 - protein, 11 aa, synthetic construct
AAWKGSGWFKI

SEQ ID NO: 43304 - protein, 9 aa, synthetic construct
AAWDFYKRL

SEQ ID NO: 43305 - protein, 9 aa, synthetic construct
AEWPGLFKI

SEQ ID NO: 43306 - protein, 11 aa, synthetic construct
LRGIGPLVGSR

SEQ ID NO: 43307 - protein, 12 aa, synthetic construct
TAWDWTTGWFKI

SEQ ID NO: 43308 - protein, 9 aa, synthetic construct
AGWDFYKKL

SEQ ID NO: 43309 - protein, 12 aa, synthetic construct
AAWDYGTGWFKL

SEQ ID NO: 43310 - protein, 12 aa, synthetic construct
AAWAYTTGWLKI

SEQ ID NO: 43311 - protein, 11 aa, synthetic construct
AAWDTTGWFMI

SEQ ID NO: 43312 - protein, 11 aa, synthetic construct
AAWDTTGWFTI

SEQ ID NO: 43313 - protein, 11 aa, synthetic construct
AAAGGGYFKKL

SEQ ID NO: 43314 - protein, 9 aa, synthetic construct
AAGPGWFKR

SEQ ID NO: 43315 - protein, 12 aa, synthetic construct
AAWDYGTGWFKM

SEQ ID NO: 43316 - protein, 12 aa, synthetic construct
AAWDYGTGWFKK

SEQ ID NO: 43317 - protein, 12 aa, synthetic construct
AAGDYTTGWVKI

SEQ ID NO: 43318 - protein, 11 aa, synthetic construct
AAWDTTSWFKI

SEQ ID NO: 43319 - protein, 12 aa, synthetic construct
AAWDYGTGRFKI

SEQ ID NO: 43320 - protein, 12 aa, synthetic construct
AAWDYGTGLFKI

SEQ ID NO: 43321 - protein, 11 aa, synthetic construct
AAWATPGWFKI

SEQ ID NO: 43322 - protein, 12 aa, synthetic construct
AAWDYGTCWFKI

SEQ ID NO: 43323 - protein, 11 aa, synthetic construct
AAWASTGWFKI

SEQ ID NO: 43324 - protein, 12 aa, synthetic construct
AAWEHTTGWLEI

SEQ ID NO: 43325 - protein, 12 aa, synthetic construct
AAWAYTTGWVKI

SEQ ID NO: 43326 - protein, 11 aa, synthetic construct
AAAGGGYYKKQ

SEQ ID NO: 43327 - protein, 11 aa, synthetic construct
AGWVFTGWFKI

SEQ ID NO: 43328 - protein, 12 aa, synthetic construct
AAWDYHTGWFKI

SEQ ID NO: 43329 - protein, 11 aa, synthetic construct
AAWVFSGWFKI

SEQ ID NO: 43330 - protein, 11 aa, synthetic construct
AAAGGGYYKRL

SEQ ID NO: 43331 - protein, 11 aa, synthetic construct
AAGGGGYYKKL

SEQ ID NO: 43332 - protein, 11 aa, synthetic construct
TAWVFTGWFKI

SEQ ID NO: 43333 - protein, 12 aa, synthetic construct
AAWIRTTGWFKI

SEQ ID NO: 43334 - protein, 11 aa, synthetic construct
AAWVFTCWFKI

SEQ ID NO: 43335 - protein, 11 aa, synthetic construct
AAWDTSGWFKI

SEQ ID NO: 43336 - protein, 11 aa, synthetic construct
AAWVFTGRFKI

SEQ ID NO: 43337 - protein, 13 aa, synthetic construct
AAWDSGTTGWFKI

SEQ ID NO: 43338 - protein, 12 aa, synthetic construct
AAWEHTTGWFKM

SEQ ID NO: 43339 - protein, 12 aa, synthetic construct
AAWDEATGWFRI

SEQ ID NO: 43340 - protein, 13 aa, synthetic construct
AAWDQNATGWFKI

SEQ ID NO: 43341 - protein, 8 aa, synthetic construct
LRGQVGPR

SEQ ID NO: 43342 - protein, 12 aa, synthetic construct
AAWDYPNGWFKI

SEQ ID NO: 43343 - protein, 12 aa, synthetic construct
AAGDRGTGWFKI

SEQ ID NO: 43344 - protein, 11 aa, synthetic construct
AAFYTTGLLKI

SEQ ID NO: 43345 - protein, 12 aa, synthetic construct
AAWNRGTGWFKI

SEQ ID NO: 43346 - protein, 11 aa, synthetic construct
AAWVSTGRFKI

SEQ ID NO: 43347 - protein, 11 aa, synthetic construct
AAFYNTGWLKI

SEQ ID NO: 43348 - protein, 13 aa, synthetic construct
SAWDRDTTGWFKI

SEQ ID NO: 43349 - protein, 11 aa, synthetic construct
AAFYTAGWFKI

SEQ ID NO: 43350 - protein, 13 aa, synthetic construct
SAWDQNTTGWFKI

SEQ ID NO: 43351 - protein, 11 aa, synthetic construct
AAWMGTGWFKI

SEQ ID NO: 43352 - protein, 12 aa, synthetic construct
AAWDYVTGWFKI

SEQ ID NO: 43353 - protein, 11 aa, synthetic construct
AAFYTTGWCKI

SEQ ID NO: 43354 - protein, 11 aa, synthetic construct
AAWDNTGLFKI

SEQ ID NO: 43355 - protein, 11 aa, synthetic construct
AACDTTGWFKI

SEQ ID NO: 43356 - protein, 11 aa, synthetic construct
AAWVSTGWSKI

SEQ ID NO: 43357 - protein, 11 aa, synthetic construct
AAWDPTGWFKM

SEQ ID NO: 43358 - protein, 11 aa, synthetic construct
AAWKVTGWFKI

SEQ ID NO: 43359 - protein, 11 aa, synthetic construct
AAWDPTGWCKI

SEQ ID NO: 43360 - protein, 11 aa, synthetic construct
SAWVFTGWFKI

SEQ ID NO: 43361 - protein, 13 aa, synthetic construct
AAWDIGTTGWFKI

SEQ ID NO: 43362 - protein, 12 aa, synthetic construct
AAWDRGTGWFEI

SEQ ID NO: 43363 - protein, 12 aa, synthetic construct
AAWDRGTGWFNI

SEQ ID NO: 43364 - protein, 9 aa, synthetic construct
AAWPGRFKI

SEQ ID NO: 43365 - protein, 12 aa, synthetic construct
AAWDRGTGWFKM

SEQ ID NO: 43366 - protein, 9 aa, synthetic construct
SAWPGWFKI

SEQ ID NO: 43367 - protein, 13 aa, synthetic construct
AAWDRGTTGWFKI

SEQ ID NO: 43368 - protein, 11 aa, synthetic construct
AACVSTGWFKI

SEQ ID NO: 43369 - protein, 11 aa, synthetic construct
AAFCTTGWFKI

SEQ ID NO: 43370 - protein, 12 aa, synthetic construct
SAWDWTTGWFKI

SEQ ID NO: 43371 - protein, 11 aa, synthetic construct
AAWETTGRFKI

SEQ ID NO: 43372 - protein, 10 aa, synthetic construct
AAWDPSHTTG

SEQ ID NO: 43373 - protein, 11 aa, synthetic construct
AAFDTTGWFKI

SEQ ID NO: 43374 - protein, 11 aa, synthetic construct
AAWDPTGGFKI

SEQ ID NO: 43375 - protein, 14 aa, synthetic construct
AAWDPSHTNGWFKI

SEQ ID NO: 43376 - protein, 12 aa, synthetic construct
AAWDYWTGWFKI

SEQ ID NO: 43377 - protein, 11 aa, synthetic construct
AAWDPTGWFKR

SEQ ID NO: 43378 - protein, 11 aa, synthetic construct
AAWETTGWFRI

SEQ ID NO: 43379 - protein, 11 aa, synthetic construct
AAFYTTGWFRI

SEQ ID NO: 43380 - protein, 11 aa, synthetic construct
AAWKGTGWFRI

SEQ ID NO: 43381 - protein, 7 aa, synthetic construct
AAWDYTT

SEQ ID NO: 43382 - protein, 13 aa, synthetic construct
AAWDLGTTCWFKI

SEQ ID NO: 43383 - protein, 12 aa, synthetic construct
AAWYYTTGWFKI

SEQ ID NO: 43384 - protein, 13 aa, synthetic construct
AAWDLGTAGWFKI

SEQ ID NO: 43385 - protein, 11 aa, synthetic construct
AAWKGTGWVKI

SEQ ID NO: 43386 - protein, 11 aa, synthetic construct
AAWVFTGWVKI

SEQ ID NO: 43387 - protein, 9 aa, synthetic construct
AAWPGWFKK

SEQ ID NO: 43388 - protein, 11 aa, synthetic construct
AAFYTTGWSKI

SEQ ID NO: 43389 - protein, 11 aa, synthetic construct
AAWKGTGWFKT

SEQ ID NO: 43390 - protein, 11 aa, synthetic construct
AAWKGTGWFKL

SEQ ID NO: 43391 - protein, 12 aa, synthetic construct
AAWDRGSGWFKI

SEQ ID NO: 43392 - protein, 10 aa, synthetic construct
LRGSSLVGSR

SEQ ID NO: 43393 - protein, 11 aa, synthetic construct
AAWDITGWFKI

SEQ ID NO: 43394 - protein, 10 aa, synthetic construct
LRGSPLVGSR

SEQ ID NO: 43395 - protein, 11 aa, synthetic construct
AAWDPTGWFTI

SEQ ID NO: 43396 - protein, 11 aa, synthetic construct
SAFYTTGWFKI

SEQ ID NO: 43397 - protein, 13 aa, synthetic construct
AAWDLGTTGWCKI

SEQ ID NO: 43398 - protein, 13 aa, synthetic construct
AAWDRYTTGWFKT

SEQ ID NO: 43399 - protein, 11 aa, synthetic construct
AAWETTGWYKI

SEQ ID NO: 43400 - protein, 12 aa, synthetic construct
AAWDYTTDWFKI

SEQ ID NO: 43401 - protein, 13 aa, synthetic construct
AAWDLGTTGWFKR

SEQ ID NO: 43402 - protein, 14 aa, synthetic construct
AAGAWGYTTGWFKI

SEQ ID NO: 43403 - protein, 13 aa, synthetic construct
AAWDLGTTGWFQI

SEQ ID NO: 43404 - protein, 13 aa, synthetic construct
AAWDLGTTGWFRI

SEQ ID NO: 43405 - protein, 11 aa, synthetic construct
AAWETTGWSKI

SEQ ID NO: 43406 - protein, 9 aa, synthetic construct
AAWWGWFKI

SEQ ID NO: 43407 - protein, 14 aa, synthetic construct
AAWDLPHTTGWFKI

SEQ ID NO: 43408 - protein, 12 aa, synthetic construct
AAWDYTTGWFMI

SEQ ID NO: 43409 - protein, 13 aa, synthetic construct
SAWDLGTTGWFKI

SEQ ID NO: 43410 - protein, 12 aa, synthetic construct
AAWERTTGWFKI

SEQ ID NO: 43411 - protein, 11 aa, synthetic construct
AAWVVTGWFKI

SEQ ID NO: 43412 - protein, 11 aa, synthetic construct
AAWKGTGWFQI

SEQ ID NO: 43413 - protein, 12 aa, synthetic construct
AAWDRGTGWFKV

SEQ ID NO: 43414 - protein, 13 aa, synthetic construct
ATWDQNTTGWFKI

SEQ ID NO: 43415 - protein, 12 aa, synthetic construct
AAWANTTGWFRI

SEQ ID NO: 43416 - protein, 12 aa, synthetic construct
AAWDWTIGWFKI

SEQ ID NO: 43417 - protein, 12 aa, synthetic construct
AAWGNTTGWFKI

SEQ ID NO: 43418 - protein, 14 aa, synthetic construct
AAWDYEETTGWFKI

SEQ ID NO: 43419 - protein, 10 aa, synthetic construct
AAWDRCYKKL

SEQ ID NO: 43420 - protein, 11 aa, synthetic construct
ASWKGTGWFKI

SEQ ID NO: 43421 - protein, 11 aa, synthetic construct
AAWGSTGWFKI

SEQ ID NO: 43422 - protein, 9 aa, synthetic construct
VAWPGWFKI

SEQ ID NO: 43423 - protein, 11 aa, synthetic construct
AVFYTTGWFKI

SEQ ID NO: 43424 - protein, 13 aa, synthetic construct
AAWDRATTGWFKI

SEQ ID NO: 43425 - protein, 12 aa, synthetic construct
AVWDEATGWFKI

SEQ ID NO: 43426 - protein, 14 aa, synthetic construct
AAWDWVYTTSWFKI

SEQ ID NO: 43427 - protein, 12 aa, synthetic construct
AAWANTIGWFKI

SEQ ID NO: 43428 - protein, 12 aa, synthetic construct
ASWDYTTGWFKI

SEQ ID NO: 43429 - protein, 11 aa, synthetic construct
AAWAFTGWFKI

SEQ ID NO: 43430 - protein, 12 aa, synthetic construct
AAWDWTTGWSKI

SEQ ID NO: 43431 - protein, 13 aa, synthetic construct
AVWDQNTTGWFKI

SEQ ID NO: 43432 - protein, 14 aa, synthetic construct
AAWDWVYTTGWFKT

SEQ ID NO: 43433 - protein, 11 aa, synthetic construct
AALYNTGWFKI

SEQ ID NO: 43434 - protein, 10 aa, synthetic construct
AAWDWYYNKI

SEQ ID NO: 43435 - protein, 13 aa, synthetic construct
DAWDRDTTGWFKI

SEQ ID NO: 43436 - protein, 10 aa, synthetic construct
AASSTGWFKI

SEQ ID NO: 43437 - protein, 13 aa, synthetic construct
AAWDRDTNGWLKI

SEQ ID NO: 43438 - protein, 12 aa, synthetic construct
AVWDYTTGWFKI

SEQ ID NO: 43439 - protein, 12 aa, synthetic construct
ASWDWTTGWFKI

SEQ ID NO: 43440 - protein, 13 aa, synthetic construct
DAWDQNTTGWFKI

SEQ ID NO: 43441 - protein, 13 aa, synthetic construct
AAWDRDTTGWFKV

SEQ ID NO: 43442 - protein, 9 aa, synthetic construct
AAWSGWFKI

SEQ ID NO: 43443 - protein, 14 aa, synthetic construct
AAWDWVYTTGRFKI

SEQ ID NO: 43444 - protein, 10 aa, synthetic construct
AAWDWYYEKL

SEQ ID NO: 43445 - protein, 11 aa, synthetic construct
ASWVFTGWFKI

SEQ ID NO: 43446 - protein, 13 aa, synthetic construct
AAWARDTPGWFKI

SEQ ID NO: 43447 - protein, 11 aa, synthetic construct
ATWDTTGWFKI

SEQ ID NO: 43448 - protein, 12 aa, synthetic construct
AAWGYGTGWFKI

SEQ ID NO: 43449 - protein, 11 aa, synthetic construct
VAWDTTGWFKI

SEQ ID NO: 43450 - protein, 14 aa, synthetic construct
AALDWVYTTGWFKI

SEQ ID NO: 43451 - protein, 13 aa, synthetic construct
AAWDRDATGWFKI

SEQ ID NO: 43452 - protein, 13 aa, synthetic construct
AAWSPRATGWFKI

SEQ ID NO: 43453 - protein, 11 aa, synthetic construct
AAWDLTGWFKI

SEQ ID NO: 43454 - protein, 13 aa, synthetic construct
AAWDLGITGWFKI

SEQ ID NO: 43455 - protein, 11 aa, synthetic construct
AAWDYTTGCPR

SEQ ID NO: 43456 - protein, 12 aa, synthetic construct
AAWDYTTGLLKI

SEQ ID NO: 43457 - protein, 12 aa, synthetic construct
SAWDLTTGWFKI

SEQ ID NO: 43458 - protein, 12 aa, synthetic construct
AAWDYRTGWFKI

SEQ ID NO: 43459 - protein, 12 aa, synthetic construct
AAWDWTTGWFKL

SEQ ID NO: 43460 - protein, 12 aa, synthetic construct
AAWDYTTGWFTI

SEQ ID NO: 43461 - protein, 12 aa, synthetic construct
AAWDYTTGWFKL

SEQ ID NO: 43462 - protein, 11 aa, synthetic construct
AAAGGGCYKKL

SEQ ID NO: 43463 - protein, 13 aa, synthetic construct
AAWDRYTTGWFKM

SEQ ID NO: 43464 - protein, 11 aa, synthetic construct
AAWDPTGWVTI

SEQ ID NO: 43465 - protein, 12 aa, synthetic construct
AAWEHTAGWFKI

SEQ ID NO: 43466 - protein, 13 aa, synthetic construct
AAWDRYTTGRFKI

SEQ ID NO: 43467 - protein, 11 aa, synthetic construct
AAAGGGCYKKI

SEQ ID NO: 43468 - protein, 12 aa, synthetic construct
DAWDRGTGWLKI

SEQ ID NO: 43469 - protein, 14 aa, synthetic construct
AAGAPSHTPGWFKI

SEQ ID NO: 43470 - protein, 13 aa, synthetic construct
ATWDRYTTGWFKI

SEQ ID NO: 43471 - protein, 12 aa, synthetic construct
AAWDLGPGWFKI

SEQ ID NO: 43472 - protein, 12 aa, synthetic construct
AAWDWTTCWFNI

SEQ ID NO: 43473 - protein, 11 aa, synthetic construct
AAWKGTGWFNI

SEQ ID NO: 43474 - protein, 11 aa, synthetic construct
AAWVYTGWLKI

SEQ ID NO: 43475 - protein, 13 aa, synthetic construct
AAWDRDTAGWFKI

SEQ ID NO: 43476 - protein, 12 aa, synthetic construct
AAWEWTTGWFKI

SEQ ID NO: 43477 - protein, 13 aa, synthetic construct
AAGALGTPGWFKI

SEQ ID NO: 43478 - protein, 13 aa, synthetic construct
AAWDRYTTGWFEI

SEQ ID NO: 43479 - protein, 14 aa, synthetic construct
AAWDWVYTTGWLKK

SEQ ID NO: 43480 - protein, 14 aa, synthetic construct
AVWDPSHTTGWFNI

SEQ ID NO: 43481 - protein, 13 aa, synthetic construct
AAWDLGTTAWFKI

SEQ ID NO: 43482 - protein, 9 aa, synthetic construct
AAWAFYKKL

SEQ ID NO: 43483 - protein, 12 aa, synthetic construct
AAWEHTTCWFKI

SEQ ID NO: 43484 - protein, 13 aa, synthetic construct
AAWDLGTTGLLKI

SEQ ID NO: 43485 - protein, 13 aa, synthetic construct
AAWDLGTTGLFNI

SEQ ID NO: 43486 - protein, 11 aa, synthetic construct
AAWYPTGWFKI

SEQ ID NO: 43487 - protein, 13 aa, synthetic construct
AAWYQNTTGWFKI

SEQ ID NO: 43488 - protein, 10 aa, synthetic construct
AAWAGDYKKL

SEQ ID NO: 43489 - protein, 12 aa, synthetic construct
AAWDWTTGCFKI

SEQ ID NO: 43490 - protein, 13 aa, synthetic construct
AAWDRDTTGWFKK

SEQ ID NO: 43491 - protein, 8 aa, synthetic construct
AAWEHTTG

SEQ ID NO: 43492 - protein, 13 aa, synthetic construct
AAWDRYTTGWFMI

SEQ ID NO: 43493 - protein, 10 aa, synthetic construct
AAWEWDYKKL

SEQ ID NO: 43494 - protein, 13 aa, synthetic construct
AAWDLGTTGCFKI

SEQ ID NO: 43495 - protein, 11 aa, synthetic construct
AAWDPTGWIKI

SEQ ID NO: 43496 - protein, 12 aa, synthetic construct
AAGDEATGWLKI

SEQ ID NO: 43497 - protein, 12 aa, synthetic construct
AAWYWTTGWFKI

SEQ ID NO: 43498 - protein, 11 aa, synthetic construct
AAYYTTGWFKI

SEQ ID NO: 43499 - protein, 11 aa, synthetic construct
ATWVFTGWFKI

SEQ ID NO: 43500 - protein, 13 aa, synthetic construct
AAWYLGTTGWFKV

SEQ ID NO: 43501 - protein, 12 aa, synthetic construct
ATWDWTTGWFKI

SEQ ID NO: 43502 - protein, 14 aa, synthetic construct
AAWDLVYTTGWLKI

SEQ ID NO: 43503 - protein, 13 aa, synthetic construct
AAWYLGTTGWFKI

SEQ ID NO: 43504 - protein, 10 aa, synthetic construct
AAWEWEYKKL

SEQ ID NO: 43505 - protein, 12 aa, synthetic construct
AAGAYGTGWFKI

SEQ ID NO: 43506 - protein, 11 aa, synthetic construct
VAWVFTGWFKI

SEQ ID NO: 43507 - protein, 11 aa, synthetic construct
AAVYNTGWFKI

SEQ ID NO: 43508 - protein, 11 aa, synthetic construct
AAAGGGDYKKL

SEQ ID NO: 43509 - protein, 13 aa, synthetic construct
AAWDLGTTGWFKL

SEQ ID NO: 43510 - protein, 14 aa, synthetic construct
AAGAWVYPTGWFKI

SEQ ID NO: 43511 - protein, 13 aa, synthetic construct
PAWDRYTTGWFKI

SEQ ID NO: 43512 - protein, 12 aa, synthetic construct
AALDYTTGWLKI

SEQ ID NO: 43513 - protein, 13 aa, synthetic construct
AAWDLGTTGWFMI

SEQ ID NO: 43514 - protein, 13 aa, synthetic construct
DAWDRYTTGWFKI

SEQ ID NO: 43515 - protein, 14 aa, synthetic construct
AVWDWVYTTGWFKI

SEQ ID NO: 43516 - protein, 13 aa, synthetic construct
AAWGHYTTGWFKI

SEQ ID NO: 43517 - protein, 12 aa, synthetic construct
AAWDYTTGWIKI

SEQ ID NO: 43518 - protein, 9 aa, synthetic construct
AAWPSWFKI

SEQ ID NO: 43519 - protein, 9 aa, synthetic construct
DAWDFYKKL

SEQ ID NO: 43520 - protein, 10 aa, synthetic construct
AARDWYYKKH

SEQ ID NO: 43521 - protein, 9 aa, synthetic construct
AAWDYYKKL

SEQ ID NO: 43522 - protein, 9 aa, synthetic construct
AAWPRWFKI

SEQ ID NO: 43523 - protein, 12 aa, synthetic construct
AACDYGTGWFKI

SEQ ID NO: 43524 - protein, 13 aa, synthetic construct
AAWGRDTTGLFKI

SEQ ID NO: 43525 - protein, 9 aa, synthetic construct
AAWNYYKKL

SEQ ID NO: 43526 - protein, 14 aa, synthetic construct
AAWDPSHTNGWFNI

SEQ ID NO: 43527 - protein, 14 aa, synthetic construct
AAWDWVYATGWFKI

SEQ ID NO: 43528 - protein, 14 aa, synthetic construct
AAWDWVYTSGWFKI

SEQ ID NO: 43529 - protein, 14 aa, synthetic construct
AAWDWVYTTDWFKI

SEQ ID NO: 43530 - protein, 13 aa, synthetic construct
AAWDRDTTCWFKI

SEQ ID NO: 43531 - protein, 10 aa, synthetic construct
AACDWYYKKL

SEQ ID NO: 43532 - protein, 11 aa, synthetic construct
AAWVSNGWFKI

SEQ ID NO: 43533 - protein, 12 aa, synthetic construct
AAREHTTCWFKI

SEQ ID NO: 43534 - protein, 14 aa, synthetic construct
AAWDPSHATGWFKI

SEQ ID NO: 43535 - protein, 11 aa, synthetic construct
AAFHTTGWFKI

SEQ ID NO: 43536 - protein, 11 aa, synthetic construct
AAFNNTGWFKI

SEQ ID NO: 43537 - protein, 11 aa, synthetic construct
AAFDPTGWFKI

SEQ ID NO: 43538 - protein, 14 aa, synthetic construct
AAWDPSHTTGWFEI

SEQ ID NO: 43539 - protein, 13 aa, synthetic construct
AAWDRYTTGGFKI

SEQ ID NO: 43540 - protein, 11 aa, synthetic construct
SAWKGTGWFKI

SEQ ID NO: 43541 - protein, 13 aa, synthetic construct
AARDRYTTGWFKI

SEQ ID NO: 43542 - protein, 14 aa, synthetic construct
AAWDPSPTTGWFKI

SEQ ID NO: 43543 - protein, 14 aa, synthetic construct
AAWDWVYTAGWFKI

SEQ ID NO: 43544 - protein, 8 aa, synthetic construct
AACGWFKI

SEQ ID NO: 43545 - protein, 13 aa, synthetic construct
AARDSYTTGWFKI

SEQ ID NO: 43546 - protein, 9 aa, synthetic construct
AAWPGWVKI

SEQ ID NO: 43547 - protein, 12 aa, synthetic construct
AAWDRGTGWYKI

SEQ ID NO: 43548 - protein, 7 aa, synthetic construct
AAWETTG

SEQ ID NO: 43549 - protein, 11 aa, synthetic construct
AARDTTGWLKI

SEQ ID NO: 43550 - protein, 11 aa, synthetic construct
AAWETPGWFQI

SEQ ID NO: 43551 - protein, 13 aa, synthetic construct
AAWDPSHTTGWFR

SEQ ID NO: 43552 - protein, 9 aa, synthetic construct
AAWPGWYKI

SEQ ID NO: 43553 - protein, 12 aa, synthetic construct
AAWVNTTGWFKI

SEQ ID NO: 43554 - protein, 14 aa, synthetic construct
AAWDPSYTTGWFKI

SEQ ID NO: 43555 - protein, 14 aa, synthetic construct
AAWDPSHTTGWFKT

SEQ ID NO: 43556 - protein, 12 aa, synthetic construct
AARDWTTGWFKI

SEQ ID NO: 43557 - protein, 9 aa, synthetic construct
AAWPGGFKI

SEQ ID NO: 43558 - protein, 14 aa, synthetic construct
AAWDPSHTTGWFKK

SEQ ID NO: 43559 - protein, 9 aa, synthetic construct
AARDFYKKL

SEQ ID NO: 43560 - protein, 11 aa, synthetic construct
AAWGPTGWYKI

SEQ ID NO: 43561 - protein, 12 aa, synthetic construct
AAWDRGTGRFKI

SEQ ID NO: 43562 - protein, 12 aa, synthetic construct
AAWDWTTGWFNI

SEQ ID NO: 43563 - protein, 12 aa, synthetic construct
AAWDWTTGWLKT

SEQ ID NO: 43564 - protein, 11 aa, synthetic construct
AAWETTGWFNI

SEQ ID NO: 43565 - protein, 11 aa, synthetic construct
AALYTTGLFKI

SEQ ID NO: 43566 - protein, 14 aa, synthetic construct
AAWDWVYTTGWFKR

SEQ ID NO: 43567 - protein, 9 aa, synthetic construct
AVWPGWFKI

SEQ ID NO: 43568 - protein, 11 aa, synthetic construct
AAFYTTGWFMI

SEQ ID NO: 43569 - protein, 11 aa, synthetic construct
AAWDPTGWFKL

SEQ ID NO: 43570 - protein, 11 aa, synthetic construct
AVWETTGWFKI

SEQ ID NO: 43571 - protein, 13 aa, synthetic construct
AAWDMDTTGWLKI

SEQ ID NO: 43572 - protein, 14 aa, synthetic construct
AAWDYTYTTGWFKI

SEQ ID NO: 43573 - protein, 12 aa, synthetic construct
AAWDWTTGWFKV

SEQ ID NO: 43574 - protein, 14 aa, synthetic construct
SAWDPSHTTGWFKI

SEQ ID NO: 43575 - protein, 11 aa, synthetic construct
AAWESTGWFKI

SEQ ID NO: 43576 - protein, 12 aa, synthetic construct
AAWDSATGWFKI

SEQ ID NO: 43577 - protein, 12 aa, synthetic construct
AAWDYTTGWLKK

SEQ ID NO: 43578 - protein, 13 aa, synthetic construct
AAWDRYTTCWFKI

SEQ ID NO: 43579 - protein, 9 aa, synthetic construct
AAGAEYKKL

SEQ ID NO: 43580 - protein, 13 aa, synthetic construct
AAWDRYTTDWFKI

SEQ ID NO: 43581 - protein, 10 aa, synthetic construct
AANTTGWFKI

SEQ ID NO: 43582 - protein, 11 aa, synthetic construct
AAWVSTGWFQI

SEQ ID NO: 43583 - protein, 12 aa, synthetic construct
AAWDNTTGWFKI

SEQ ID NO: 43584 - protein, 7 aa, synthetic construct
AAFYTTG

SEQ ID NO: 43585 - protein, 8 aa, synthetic construct
AAWDRDTT

SEQ ID NO: 43586 - protein, 11 aa, synthetic construct
AAWDPTGWFEI

SEQ ID NO: 43587 - protein, 11 aa, synthetic construct
AAWETTGWFKR

SEQ ID NO: 43588 - protein, 8 aa, synthetic construct
AAWVSTGW

SEQ ID NO: 43589 - protein, 12 aa, synthetic construct
AAWDWTTVWFKI

SEQ ID NO: 43590 - protein, 14 aa, synthetic construct
AAWDPGDTTGWFKI

SEQ ID NO: 43591 - protein, 14 aa, synthetic construct
AAWDPAQTTGWFKI

SEQ ID NO: 43592 - protein, 12 aa, synthetic construct
AAWDWTTSWFKI

SEQ ID NO: 43593 - protein, 10 aa, synthetic construct
AAWVSTGWFK

SEQ ID NO: 43594 - protein, 12 aa, synthetic construct
AAWDYTTGWYKI

SEQ ID NO: 43595 - protein, 13 aa, synthetic construct
AAWELGTTGGFKI

SEQ ID NO: 43596 - protein, 13 aa, synthetic construct
AAWDRYATGWFKI

SEQ ID NO: 43597 - protein, 11 aa, synthetic construct
AAFYTAGWLKI

SEQ ID NO: 43598 - protein, 11 aa, synthetic construct
AAWDPAGWFKI

SEQ ID NO: 43599 - protein, 12 aa, synthetic construct
AAWDWTTGWVKI

SEQ ID NO: 43600 - protein, 13 aa, synthetic construct
SAWDQNTTGLFKI

SEQ ID NO: 43601 - protein, 12 aa, synthetic construct
AAWNEATGWFKI

SEQ ID NO: 43602 - protein, 12 aa, synthetic construct
AAWDRGTGGFKI

SEQ ID NO: 43603 - protein, 10 aa, synthetic construct
LRGTPLVGPR

SEQ ID NO: 43604 - protein, 10 aa, synthetic construct
AAWDWYHKKL

SEQ ID NO: 43605 - protein, 9 aa, synthetic construct
AAWTGWFKI

SEQ ID NO: 43606 - protein, 14 aa, synthetic construct
AAWDWIYTTGWFKI

SEQ ID NO: 43607 - protein, 10 aa, synthetic construct
AAWDWHYKKL

SEQ ID NO: 43608 - protein, 10 aa, synthetic construct
AAWDWYYRKL

SEQ ID NO: 43609 - protein, 11 aa, synthetic construct
AAWVFTAWFKI

SEQ ID NO: 43610 - protein, 10 aa, synthetic construct
AAWDTTGWFK

SEQ ID NO: 43611 - protein, 12 aa, synthetic construct
AAWEHTTGWFRI

SEQ ID NO: 43612 - protein, 12 aa, synthetic construct
AAWDYKTGWFKI

SEQ ID NO: 43613 - protein, 13 aa, synthetic construct
AAWDQNTTDWFKI

SEQ ID NO: 43614 - protein, 9 aa, synthetic construct
AALDFYKKL

SEQ ID NO: 43615 - protein, 13 aa, synthetic construct
AAWGLGTPGWFKI

SEQ ID NO: 43616 - protein, 12 aa, synthetic construct
AAWDCPTGWFKI

SEQ ID NO: 43617 - protein, 13 aa, synthetic construct
AAGGRDTTGWFKI

SEQ ID NO: 43618 - protein, 11 aa, synthetic construct
AAAGGGYYKKR

SEQ ID NO: 43619 - protein, 7 aa, synthetic construct
ALGYKKL

SEQ ID NO: 43620 - protein, 11 aa, synthetic construct
AAWDCAGWFKI

SEQ ID NO: 43621 - protein, 13 aa, synthetic construct
AAWDQNTTGWVKI

SEQ ID NO: 43622 - protein, 14 aa, synthetic construct
AAWDASHTTGWFKI

SEQ ID NO: 43623 - protein, 11 aa, synthetic construct
AAAGGGYYKKP

SEQ ID NO: 43624 - protein, 12 aa, synthetic construct
AAWIMSTGWFKI

SEQ ID NO: 43625 - protein, 14 aa, synthetic construct
AAWDCVYTTGWFKI

SEQ ID NO: 43626 - protein, 12 aa, synthetic construct
AAWGEATGWFKI

SEQ ID NO: 43627 - protein, 10 aa, synthetic construct
AAWDTTGGSR

SEQ ID NO: 43628 - protein, 12 aa, synthetic construct
AAWDRGAGWFKI

SEQ ID NO: 43629 - protein, 12 aa, synthetic construct
TAWEHTTGWFKI

SEQ ID NO: 43630 - protein, 11 aa, synthetic construct
DAWETTGWFKI

SEQ ID NO: 43631 - protein, 13 aa, synthetic construct
AAWDRDITGWFKI

SEQ ID NO: 43632 - protein, 11 aa, synthetic construct
TAWKGTGWFKI

SEQ ID NO: 43633 - protein, 12 aa, synthetic construct
AAWDEAPGGFKI

SEQ ID NO: 43634 - protein, 12 aa, synthetic construct
AAWDYNTGWLNI

SEQ ID NO: 43635 - protein, 14 aa, synthetic construct
AAGEWVYTTGWFKI

SEQ ID NO: 43636 - protein, 11 aa, synthetic construct
AAAGGGYYNKI

SEQ ID NO: 43637 - protein, 12 aa, synthetic construct
AAGEYGTGWFKI

SEQ ID NO: 43638 - protein, 12 aa, synthetic construct
AAWANTTGWFKL

SEQ ID NO: 43639 - protein, 12 aa, synthetic construct
AAWGDTTGWFKI

SEQ ID NO: 43640 - protein, 12 aa, synthetic construct
AAWANTTGWFKV

SEQ ID NO: 43641 - protein, 13 aa, synthetic construct
AGWEGNTTGWFKI

SEQ ID NO: 43642 - protein, 13 aa, synthetic construct
GAWDLGTTGWFKI

SEQ ID NO: 43643 - protein, 11 aa, synthetic construct
AAWDTTGGFKI

SEQ ID NO: 43644 - protein, 10 aa, synthetic construct
AAWDCYYKKL

SEQ ID NO: 43645 - protein, 9 aa, synthetic construct
AAWAYYKKL

SEQ ID NO: 43646 - protein, 9 aa, synthetic construct
DAWPGWFKI

SEQ ID NO: 43647 - protein, 12 aa, synthetic construct
AAWANTTGWFEI

SEQ ID NO: 43648 - protein, 11 aa, synthetic construct
AAGVSPGWFKI

SEQ ID NO: 43649 - protein, 14 aa, synthetic construct
AAWAWGYTTGWFKI

SEQ ID NO: 43650 - protein, 9 aa, synthetic construct
ASTTGWFKI

SEQ ID NO: 43651 - protein, 12 aa, synthetic construct
AAWEHTTSWFKI

SEQ ID NO: 43652 - protein, 10 aa, synthetic construct
AAWENYYKKL

SEQ ID NO: 43653 - protein, 13 aa, synthetic construct
AAWDQNTTGWFKV

SEQ ID NO: 43654 - protein, 13 aa, synthetic construct
AAWDYFTTGWFKI

SEQ ID NO: 43655 - protein, 13 aa, synthetic construct
AAWDQNTTGWFNI

SEQ ID NO: 43656 - protein, 9 aa, synthetic construct
ASWDFYKKL

SEQ ID NO: 43657 - protein, 13 aa, synthetic construct
AAWDRDTTGWIKI

SEQ ID NO: 43658 - protein, 12 aa, synthetic construct
AAWANTTGWYKI

SEQ ID NO: 43659 - protein, 10 aa, synthetic construct
AAWDWCYKKP

SEQ ID NO: 43660 - protein, 12 aa, synthetic construct
AAWDYGAGWFKI

SEQ ID NO: 43661 - protein, 13 aa, synthetic construct
AAWDQNTTGWFTI

SEQ ID NO: 43662 - protein, 13 aa, synthetic construct
AAWDRDTTGWFRI

SEQ ID NO: 43663 - protein, 10 aa, synthetic construct
AAWDWCCKKL

SEQ ID NO: 43664 - protein, 12 aa, synthetic construct
AAWGYNTGWFKI

SEQ ID NO: 43665 - protein, 10 aa, synthetic construct
AAWDWCYEKL

SEQ ID NO: 43666 - protein, 12 aa, synthetic construct
AAWARGTGWFKI

SEQ ID NO: 43667 - protein, 12 aa, synthetic construct
AAWDYGTGWFEI

SEQ ID NO: 43668 - protein, 13 aa, synthetic construct
AAWDQNTTGWLNI

SEQ ID NO: 43669 - protein, 13 aa, synthetic construct
AAWAQNTTGWFKI

SEQ ID NO: 43670 - protein, 14 aa, synthetic construct
AAWAWVYTPGWFKI

SEQ ID NO: 43671 - protein, 14 aa, synthetic construct
VAWDWVYTTGWFKI

SEQ ID NO: 43672 - protein, 12 aa, synthetic construct
AAWDYGTGWFTI

SEQ ID NO: 43673 - protein, 11 aa, synthetic construct
AAGKGPGWFKI

SEQ ID NO: 43674 - protein, 12 aa, synthetic construct
AAWANTTVWFKI

SEQ ID NO: 43675 - protein, 12 aa, synthetic construct
AAWDYGTGWFQI

SEQ ID NO: 43676 - protein, 8 aa, synthetic construct
AAWDWFKI

SEQ ID NO: 43677 - protein, 12 aa, synthetic construct
AAWEHTTGWVKI

SEQ ID NO: 43678 - protein, 12 aa, synthetic construct
AAWAYPTGWVKI

SEQ ID NO: 43679 - protein, 12 aa, synthetic construct
AAWAYNTGWFKI

SEQ ID NO: 43680 - protein, 12 aa, synthetic construct
ASWDRGTGWFKI

SEQ ID NO: 43681 - protein, 11 aa, synthetic construct
AAWHTTGWFKI

SEQ ID NO: 43682 - protein, 11 aa, synthetic construct
AAWDYEGWFKI

SEQ ID NO: 43683 - protein, 11 aa, synthetic construct
AAWDTTGWLRI

SEQ ID NO: 43684 - protein, 14 aa, synthetic construct
AAWAWVYTTGWLKI

SEQ ID NO: 43685 - protein, 12 aa, synthetic construct
AAWDYGTGWFKT

SEQ ID NO: 43686 - protein, 12 aa, synthetic construct
AAWAPTTGWFKI

SEQ ID NO: 43687 - protein, 11 aa, synthetic construct
AAAGGGYDKKL

SEQ ID NO: 43688 - protein, 12 aa, synthetic construct
AAWDEATGGFKI

SEQ ID NO: 43689 - protein, 12 aa, synthetic construct
AAWEHTTGWFKV

SEQ ID NO: 43690 - protein, 11 aa, synthetic construct
AAGEPTGWFKI

SEQ ID NO: 43691 - protein, 12 aa, synthetic construct
DAWDYNTGWFKI

SEQ ID NO: 43692 - protein, 12 aa, synthetic construct
AAWDHGTGWFKI

SEQ ID NO: 43693 - protein, 11 aa, synthetic construct
AAGDTTGWVKI

SEQ ID NO: 43694 - protein, 13 aa, synthetic construct
AAWDQDTTGWFKI

SEQ ID NO: 43695 - protein, 13 aa, synthetic construct
AAWALGTPGWFKI

SEQ ID NO: 43696 - protein, 11 aa, synthetic construct
AAWVFTGWFKT

SEQ ID NO: 43697 - protein, 12 aa, synthetic construct
AAWDWTAGWFKI

SEQ ID NO: 43698 - protein, 12 aa, synthetic construct
AAWDYPTGWFRI

SEQ ID NO: 43699 - protein, 12 aa, synthetic construct
AAWDWSTGWFKI

SEQ ID NO: 43700 - protein, 11 aa, synthetic construct
AAWDFTGWFKI

SEQ ID NO: 43701 - protein, 9 aa, synthetic construct
AAWDFYRKL

SEQ ID NO: 43702 - protein, 12 aa, synthetic construct
AAWDSTTGWFKI

SEQ ID NO: 43703 - protein, 12 aa, synthetic construct
AAWDYPAGWFKI

SEQ ID NO: 43704 - protein, 13 aa, synthetic construct
AAWDQKTTGWLKI

SEQ ID NO: 43705 - protein, 12 aa, synthetic construct
AAWDYPTGWFNI

SEQ ID NO: 43706 - protein, 11 aa, synthetic construct
ASWENTGWFKI

SEQ ID NO: 43707 - protein, 13 aa, synthetic construct
AAWALYTTGWFKI

SEQ ID NO: 43708 - protein, 11 aa, synthetic construct
AAGDTTGWCKI

SEQ ID NO: 43709 - protein, 14 aa, synthetic construct
AEWDWVYTTGWFKI

SEQ ID NO: 43710 - protein, 14 aa, synthetic construct
AAWDHSHTTGWFKI

SEQ ID NO: 43711 - protein, 12 aa, synthetic construct
AEWDWTTGWFKI

SEQ ID NO: 43712 - protein, 13 aa, synthetic construct
AAWDSDTTGWFKI

SEQ ID NO: 43713 - protein, 12 aa, synthetic construct
AAWGHTTGWFEI

SEQ ID NO: 43714 - protein, 14 aa, synthetic construct
AEWDPSHTTGWFKI

SEQ ID NO: 43715 - protein, 13 aa, synthetic construct
AAWDKGTTGWFKI

SEQ ID NO: 43716 - protein, 12 aa, synthetic construct
AAWDKGTGWFKI

SEQ ID NO: 43717 - protein, 13 aa, synthetic construct
AAWDKDTTGWFKI

SEQ ID NO: 43718 - protein, 14 aa, synthetic construct
DAWDWVYTTGWFNI

SEQ ID NO: 43719 - protein, 13 aa, synthetic construct
AAWDSDTTGWSKI

SEQ ID NO: 43720 - protein, 12 aa, synthetic construct
AAWAKTTGWFKI

SEQ ID NO: 43721 - protein, 12 aa, synthetic construct
AAWDWTSGWFKI

SEQ ID NO: 43722 - protein, 12 aa, synthetic construct
AALDWTTGWFKI

SEQ ID NO: 43723 - protein, 10 aa, synthetic construct
AAWDWYYKEL

SEQ ID NO: 43724 - protein, 11 aa, synthetic construct
AAGDSTGWFKI

SEQ ID NO: 43725 - protein, 11 aa, synthetic construct
ASWVSTGWFKI

SEQ ID NO: 43726 - protein, 13 aa, synthetic construct
AAWDSNTTGWFKI

SEQ ID NO: 43727 - protein, 12 aa, synthetic construct
AAWANATGWFKI

SEQ ID NO: 43728 - protein, 11 aa, synthetic construct
AAWGTTGWVKI

SEQ ID NO: 43729 - protein, 11 aa, synthetic construct
AAWDFRYYKKL

SEQ ID NO: 43730 - protein, 12 aa, synthetic construct
AAWDEATGWLNI

SEQ ID NO: 43731 - protein, 7 aa, synthetic construct
AAWANTT

SEQ ID NO: 43732 - protein, 12 aa, synthetic construct
AGWDEATGWFKI

SEQ ID NO: 43733 - protein, 12 aa, synthetic construct
VAWEHTTGWFKI

SEQ ID NO: 43734 - protein, 12 aa, synthetic construct
AAWDEATRWFKI

SEQ ID NO: 43735 - protein, 11 aa, synthetic construct
AAAGGGFYKKL

SEQ ID NO: 43736 - protein, 12 aa, synthetic construct
AAGDYTTGGFKI

SEQ ID NO: 43737 - protein, 10 aa, synthetic construct
AAWDWYYKKP

SEQ ID NO: 43738 - protein, 12 aa, synthetic construct
ASWDYGTGWFKI

SEQ ID NO: 43739 - protein, 15 aa, synthetic construct
AAWANTPWTAGWFKI

SEQ ID NO: 43740 - protein, 12 aa, synthetic construct
AAWDYPPGWFKI

SEQ ID NO: 43741 - protein, 13 aa, synthetic construct
AAWDQNTTSWFKI

SEQ ID NO: 43742 - protein, 11 aa, synthetic construct
AAWENTGWVKI

SEQ ID NO: 43743 - protein, 14 aa, synthetic construct
ASWDWVYTTGWFKI

SEQ ID NO: 43744 - protein, 11 aa, synthetic construct
AAAGVGYYKKL

SEQ ID NO: 43745 - protein, 12 aa, synthetic construct
AAWEHTTGWFKT

SEQ ID NO: 43746 - protein, 11 aa, synthetic construct
AAWVFTGWCKI

SEQ ID NO: 43747 - protein, 11 aa, synthetic construct
AAAGWGYYKKL

SEQ ID NO: 43748 - protein, 11 aa, synthetic construct
AAWDTNGWLKI

SEQ ID NO: 43749 - protein, 14 aa, synthetic construct
AAWDWVYTNGWFKI

SEQ ID NO: 43750 - protein, 11 aa, synthetic construct
AALDTTGWLKI

SEQ ID NO: 43751 - protein, 9 aa, synthetic construct
AAWDFDKKL

SEQ ID NO: 43752 - protein, 11 aa, synthetic construct
AAWVFTGWFKM

SEQ ID NO: 43753 - protein, 12 aa, synthetic construct
AAWANNTGWLKI

SEQ ID NO: 43754 - protein, 12 aa, synthetic construct
DAWDYTTGWLKI

SEQ ID NO: 43755 - protein, 12 aa, synthetic construct
AAGDYGTGWSKI

SEQ ID NO: 43756 - protein, 10 aa, synthetic construct
AAWDSYYKKL

SEQ ID NO: 43757 - protein, 12 aa, synthetic construct
AAWDETTGWFKI

SEQ ID NO: 43758 - protein, 11 aa, synthetic construct
AAWKGNGWFKI

SEQ ID NO: 43759 - protein, 11 aa, synthetic construct
AAWKGPGWFKK

SEQ ID NO: 43760 - protein, 12 aa, synthetic construct
AAWEQTTGWFNI

SEQ ID NO: 43761 - protein, 9 aa, synthetic construct
AAWPGVFKI

SEQ ID NO: 43762 - protein, 12 aa, synthetic construct
AAWEQTTGWLKI

SEQ ID NO: 43763 - protein, 18 aa, synthetic construct
AAWETRCWRGLFDELAQL

SEQ ID NO: 43764 - protein, 13 aa, synthetic construct
AAWERDTTGWFKK

SEQ ID NO: 43765 - protein, 9 aa, synthetic construct
AAWPGWFQI

SEQ ID NO: 43766 - protein, 9 aa, synthetic construct
AAWPGWFPI

SEQ ID NO: 43767 - protein, 11 aa, synthetic construct
AAWENTGRFKI

SEQ ID NO: 43768 - protein, 11 aa, synthetic construct
AAWENTGWFKL

SEQ ID NO: 43769 - protein, 12 aa, synthetic construct
AAWEQTTGWVKI

SEQ ID NO: 43770 - protein, 14 aa, synthetic construct
AAWEPSHTTGWFKI

SEQ ID NO: 43771 - protein, 14 aa, synthetic construct
AAWEPAHTTGWFKI

SEQ ID NO: 43772 - protein, 11 aa, synthetic construct
AAWETIGWFKI

SEQ ID NO: 43773 - protein, 12 aa, synthetic construct
AAWEPTTGWFKI

SEQ ID NO: 43774 - protein, 9 aa, synthetic construct
AAWPGWFTI

SEQ ID NO: 43775 - protein, 12 aa, synthetic construct
AAWEQTTGWFEI

SEQ ID NO: 43776 - protein, 11 aa, synthetic construct
AAWETNGWFKI

SEQ ID NO: 43777 - protein, 11 aa, synthetic construct
AAWENTGWLNI

SEQ ID NO: 43778 - protein, 11 aa, synthetic construct
AAWENTCWFKK

SEQ ID NO: 43779 - protein, 13 aa, synthetic construct
AAWEQNNTGCFKI

SEQ ID NO: 43780 - protein, 9 aa, synthetic construct
AAWPGWIKI

SEQ ID NO: 43781 - protein, 13 aa, synthetic construct
AAWERDTTGLFKI

SEQ ID NO: 43782 - protein, 12 aa, synthetic construct
AAWENTKGWFKI

SEQ ID NO: 43783 - protein, 10 aa, synthetic construct
AAWETGWFKI

SEQ ID NO: 43784 - protein, 14 aa, synthetic construct
AAWEPSHNTGWFKI

SEQ ID NO: 43785 - protein, 9 aa, synthetic construct
AAWPGWLEI

SEQ ID NO: 43786 - protein, 11 aa, synthetic construct
AAWEPTGWFNI

SEQ ID NO: 43787 - protein, 11 aa, synthetic construct
AAWKGTGWCKI

SEQ ID NO: 43788 - protein, 11 aa, synthetic construct
AAWETSGWFKI

SEQ ID NO: 43789 - protein, 13 aa, synthetic construct
AAWGGYTTGWFKI

SEQ ID NO: 43790 - protein, 13 aa, synthetic construct
AAWGLGTTGWCKI

SEQ ID NO: 43791 - protein, 13 aa, synthetic construct
AAWGLGTTGLFKI

SEQ ID NO: 43792 - protein, 14 aa, synthetic construct
AAWGWVYTTGWFKR

SEQ ID NO: 43793 - protein, 14 aa, synthetic construct
AAWGWVYTTGWFQI

SEQ ID NO: 43794 - protein, 14 aa, synthetic construct
AAWGWVYTTGWFRI

SEQ ID NO: 43795 - protein, 14 aa, synthetic construct
AAWGWVYTTVWFKI

SEQ ID NO: 43796 - protein, 11 aa, synthetic construct
AAWGITGWFQI

SEQ ID NO: 43797 - protein, 13 aa, synthetic construct
AAWGYHTTGWFKI

SEQ ID NO: 43798 - protein, 7 aa, synthetic construct
AAWGHTT

SEQ ID NO: 43799 - protein, 12 aa, synthetic construct
AAWGHTPGWFKI

SEQ ID NO: 43800 - protein, 12 aa, synthetic construct
AAWGHPTGWVKI

SEQ ID NO: 43801 - protein, 12 aa, synthetic construct
AAWGYNTGWFNI

SEQ ID NO: 43802 - protein, 12 aa, synthetic construct
AAWGYNTGWLKI

SEQ ID NO: 43803 - protein, 9 aa, synthetic construct
AAWGHNTGW

SEQ ID NO: 43804 - protein, 12 aa, synthetic construct
AAWGYSTGRFNI

SEQ ID NO: 43805 - protein, 13 aa, synthetic construct
AAWGLGTTGWFRI

SEQ ID NO: 43806 - protein, 12 aa, synthetic construct
AAWGYSTGWFKI

SEQ ID NO: 43807 - protein, 12 aa, synthetic construct
AAWGYTTGWLKI

SEQ ID NO: 43808 - protein, 9 aa, synthetic construct
AAWGGWFGV

SEQ ID NO: 43809 - protein, 12 aa, synthetic construct
AAWGGTTGWFKI

SEQ ID NO: 43810 - protein, 11 aa, synthetic construct
AAWIFTGWFKI

SEQ ID NO: 43811 - protein, 13 aa, synthetic construct
AAWIIETTGWFMI

SEQ ID NO: 43812 - protein, 11 aa, synthetic construct
AAWGGGYDNKL

SEQ ID NO: 43813 - protein, 9 aa, synthetic construct
AAWGGDYKK

SEQ ID NO: 43814 - protein, 9 aa, synthetic construct
AAWGFYKKL

SEQ ID NO: 43815 - protein, 12 aa, synthetic construct
AAWGFTTGWFKI

SEQ ID NO: 43816 - protein, 11 aa, synthetic construct
AAWGFTGWFKI

SEQ ID NO: 43817 - protein, 12 aa, synthetic construct
AAWIISTGLFKI

SEQ ID NO: 43818 - protein, 12 aa, synthetic construct
AAWGFPTGWFKI

SEQ ID NO: 43819 - protein, 13 aa, synthetic construct
AAWGFGTSGWFKI

SEQ ID NO: 43820 - protein, 13 aa, synthetic construct
AAWGLGTTGWFNI

SEQ ID NO: 43821 - protein, 12 aa, synthetic construct
AAWGWTTGWFQI

SEQ ID NO: 43822 - protein, 12 aa, synthetic construct
AAWGEATGWVKI

SEQ ID NO: 43823 - protein, 13 aa, synthetic construct
AAWGSDTNGWLMI

SEQ ID NO: 43824 - protein, 13 aa, synthetic construct
AAWGRDPPGWVKI

SEQ ID NO: 43825 - protein, 13 aa, synthetic construct
AAWGRDTPGWFKI

SEQ ID NO: 43826 - protein, 8 aa, synthetic construct
AAWGRDTT

SEQ ID NO: 43827 - protein, 13 aa, synthetic construct
AAWGRCTTGWFKI

SEQ ID NO: 43828 - protein, 13 aa, synthetic construct
AAWGRAKTRWFMI

SEQ ID NO: 43829 - protein, 13 aa, synthetic construct
AAWGQNTSGWLKI

SEQ ID NO: 43830 - protein, 11 aa, synthetic construct
AAWGPTGWFKV

SEQ ID NO: 43831 - protein, 9 aa, synthetic construct
AAWGRWFKI

SEQ ID NO: 43832 - protein, 9 aa, synthetic construct
AAWGRYKKL

SEQ ID NO: 43833 - protein, 11 aa, synthetic construct
AAWGPTGWFKL

SEQ ID NO: 43834 - protein, 13 aa, synthetic construct
AAWGRYTTGWLKI

SEQ ID NO: 43835 - protein, 10 aa, synthetic construct
AAWGPGWFKI

SEQ ID NO: 43836 - protein, 11 aa, synthetic construct
AAWGPAGWFKV

SEQ ID NO: 43837 - protein, 13 aa, synthetic construct
AAWGRYTTGWVKI

SEQ ID NO: 43838 - protein, 11 aa, synthetic construct
AAWGSNGWFKI

SEQ ID NO: 43839 - protein, 12 aa, synthetic construct
AAWGWTTGWFKT

SEQ ID NO: 43840 - protein, 12 aa, synthetic construct
AAWGNNTGWFMI

SEQ ID NO: 43841 - protein, 11 aa, synthetic construct
AAWGNKGWFKL

SEQ ID NO: 43842 - protein, 11 aa, synthetic construct
AAWGSTGWFQI

SEQ ID NO: 43843 - protein, 10 aa, synthetic construct
AAWGLYYKKL

SEQ ID NO: 43844 - protein, 10 aa, synthetic construct
AAWGTGLLKI

SEQ ID NO: 43845 - protein, 10 aa, synthetic construct
AAWGTGWFKI

SEQ ID NO: 43846 - protein, 11 aa, synthetic construct
AAWGTTGWCKL

SEQ ID NO: 43847 - protein, 14 aa, synthetic construct
AAWGLVYTTGWFKI

SEQ ID NO: 43848 - protein, 12 aa, synthetic construct
AAWGVATGWFEI

SEQ ID NO: 43849 - protein, 10 aa, synthetic construct
AAWGWCYKKL

SEQ ID NO: 43850 - protein, 12 aa, synthetic construct
AAWGWHTGWFKI

SEQ ID NO: 43851 - protein, 11 aa, synthetic construct
AAWGWTGWYQI

SEQ ID NO: 43852 - protein, 12 aa, synthetic construct
AAWGWTTGWFEI

SEQ ID NO: 43853 - protein, 11 aa, synthetic construct
AAWGLTGWFKI

SEQ ID NO: 43854 - protein, 12 aa, synthetic construct
AAWIKGTGWFKI

SEQ ID NO: 43855 - protein, 12 aa, synthetic construct
AAWIMYTGWFKI

SEQ ID NO: 43856 - protein, 11 aa, synthetic construct
AAWETTDWFKI

SEQ ID NO: 43857 - protein, 10 aa, synthetic construct
AAWETTGWFR

SEQ ID NO: 43858 - protein, 11 aa, synthetic construct
AAWKGTGWVTI

SEQ ID NO: 43859 - protein, 10 aa, synthetic construct
AAWEWDNKKL

SEQ ID NO: 43860 - protein, 10 aa, synthetic construct
AAWEWCYKKL

SEQ ID NO: 43861 - protein, 12 aa, synthetic construct
AAWEVTTGWFKI

SEQ ID NO: 43862 - protein, 11 aa, synthetic construct
AAWETTRWFKI

SEQ ID NO: 43863 - protein, 11 aa, synthetic construct
AAWKGTGWYKI

SEQ ID NO: 43864 - protein, 11 aa, synthetic construct
AAWKGTVWFKI

SEQ ID NO: 43865 - protein, 12 aa, synthetic construct
AAWKHTTGWFKI

SEQ ID NO: 43866 - protein, 11 aa, synthetic construct
AAWETTGWFVI

SEQ ID NO: 43867 - protein, 11 aa, synthetic construct
AAWETTGWFRL

SEQ ID NO: 43868 - protein, 11 aa, synthetic construct
AAWKTTGWFKI

SEQ ID NO: 43869 - protein, 11 aa, synthetic construct
AAWKYHCWFKI

SEQ ID NO: 43870 - protein, 11 aa, synthetic construct
AAWKYTGWFKT

SEQ ID NO: 43871 - protein, 11 aa, synthetic construct
AAWLSTGLLKR

SEQ ID NO: 43872 - protein, 11 aa, synthetic construct
AAWNGTGLFKK

SEQ ID NO: 43873 - protein, 14 aa, synthetic construct
AAWEWLYNTGRFKK

SEQ ID NO: 43874 - protein, 11 aa, synthetic construct
AAWETTGWFKM

SEQ ID NO: 43875 - protein, 11 aa, synthetic construct
AAWNPTGWFKI

SEQ ID NO: 43876 - protein, 11 aa, synthetic construct
AAWETTGWFKK

SEQ ID NO: 43877 - protein, 13 aa, synthetic construct
AAWNRYTTGWFKI

SEQ ID NO: 43878 - protein, 11 aa, synthetic construct
AAWETTGWCKI

SEQ ID NO: 43879 - protein, 14 aa, synthetic construct
AAWNWVYTTGWFKI

SEQ ID NO: 43880 - protein, 11 aa, synthetic construct
AAWETTGRLKI

SEQ ID NO: 43881 - protein, 9 aa, synthetic construct
AAWPAWFKI

SEQ ID NO: 43882 - protein, 11 aa, synthetic construct
AAWETTGLVNI

SEQ ID NO: 43883 - protein, 11 aa, synthetic construct
AAWETTGLLKI

SEQ ID NO: 43884 - protein, 11 aa, synthetic construct
AAWETTGGFTI

SEQ ID NO: 43885 - protein, 11 aa, synthetic construct
AAWETTGCFNK

SEQ ID NO: 43886 - protein, 11 aa, synthetic construct
AAWETTGCFKI

SEQ ID NO: 43887 - protein, 9 aa, synthetic construct
AAWPGGFKR

SEQ ID NO: 43888 - protein, 11 aa, synthetic construct
AAWKGTGWVKR

SEQ ID NO: 43889 - protein, 12 aa, synthetic construct
AAWEWNTGWFNI

SEQ ID NO: 43890 - protein, 12 aa, synthetic construct
AAWGDTTGWFEI

SEQ ID NO: 43891 - protein, 11 aa, synthetic construct
AAWKGPGWLKI

SEQ ID NO: 43892 - protein, 11 aa, synthetic construct
AAWISTCWLKI

SEQ ID NO: 43893 - protein, 12 aa, synthetic construct
AAWGDTTCWVKI

SEQ ID NO: 43894 - protein, 11 aa, synthetic construct
AAWISTGWFKM

SEQ ID NO: 43895 - protein, 11 aa, synthetic construct
AAWGDTGWFKI

SEQ ID NO: 43896 - protein, 12 aa, synthetic construct
AAWGAAHGWFKI

SEQ ID NO: 43897 - protein, 10 aa, synthetic construct
AAWFTGWFKI

SEQ ID NO: 43898 - protein, 9 aa, synthetic construct
AAWEYYKKL

SEQ ID NO: 43899 - protein, 11 aa, synthetic construct
AAWKCTGCFKI

SEQ ID NO: 43900 - protein, 11 aa, synthetic construct
AAWKCTGWFKI

SEQ ID NO: 43901 - protein, 12 aa, synthetic construct
AAWEYTTVCFNI

SEQ ID NO: 43902 - protein, 12 aa, synthetic construct
AAWEYTTGWVRI

SEQ ID NO: 43903 - protein, 12 aa, synthetic construct
AAWEYTTGWLKI

SEQ ID NO: 43904 - protein, 11 aa, synthetic construct
AAWKGKGWFKI

SEQ ID NO: 43905 - protein, 12 aa, synthetic construct
AAWEYTPGWVKI

SEQ ID NO: 43906 - protein, 12 aa, synthetic construct
AAWEYNTGWVKI

SEQ ID NO: 43907 - protein, 11 aa, synthetic construct
AAWKGTGWFTI

SEQ ID NO: 43908 - protein, 11 aa, synthetic construct
AAWKGTCWFEI

SEQ ID NO: 43909 - protein, 11 aa, synthetic construct
AAWKGTDWFKI

SEQ ID NO: 43910 - protein, 11 aa, synthetic construct
AAWKGTGGFKI

SEQ ID NO: 43911 - protein, 12 aa, synthetic construct
AAWEYGTGWFQI

SEQ ID NO: 43912 - protein, 11 aa, synthetic construct
AAWKGTGLFKL

SEQ ID NO: 43913 - protein, 11 aa, synthetic construct
AAWKGTGRFQI

SEQ ID NO: 43914 - protein, 13 aa, synthetic construct
AAWGRDSTGWFKI

SEQ ID NO: 43915 - protein, 12 aa, synthetic construct
AAWEYGPGWFKI

SEQ ID NO: 43916 - protein, 10 aa, synthetic construct
AAWEWYYNKH

SEQ ID NO: 43917 - protein, 14 aa, synthetic construct
AAWEWVYNTGWFKI

SEQ ID NO: 43918 - protein, 11 aa, synthetic construct
AAWKGTGWFMI

SEQ ID NO: 43919 - protein, 14 aa, synthetic construct
AAWEWVSTTGWFKL

SEQ ID NO: 43920 - protein, 14 aa, synthetic construct
AAWEWVSTTGWFKI

SEQ ID NO: 43921 - protein, 11 aa, synthetic construct
AAWKGTGWFQL

SEQ ID NO: 43922 - protein, 11 aa, synthetic construct
AAWGTTGWSKI

SEQ ID NO: 43923 - protein, 11 aa, synthetic construct
AAAEGGYYKKL

SEQ ID NO: 43924 - protein, 9 aa, synthetic construct
AAWPRWFHI

SEQ ID NO: 43925 - protein, 11 aa, synthetic construct
GAAGGGYYNKL

SEQ ID NO: 43926 - protein, 11 aa, synthetic construct
EAWETTGWFKI

SEQ ID NO: 43927 - protein, 11 aa, synthetic construct
EAWKGTGWLKI

SEQ ID NO: 43928 - protein, 11 aa, synthetic construct
EAWVITCWFKI

SEQ ID NO: 43929 - protein, 11 aa, synthetic construct
EDAGGGYYNKL

SEQ ID NO: 43930 - protein, 13 aa, synthetic construct
EEWDRDNNGWLKI

SEQ ID NO: 43931 - protein, 11 aa, synthetic construct
GAAGGGYYKKL

SEQ ID NO: 43932 - protein, 14 aa, synthetic construct
GAGDWVYNTGCLNK

SEQ ID NO: 43933 - protein, 9 aa, synthetic construct
DGGDFYNKL

SEQ ID NO: 43934 - protein, 12 aa, synthetic construct
GAGDYGTGWFKI

SEQ ID NO: 43935 - protein, 12 aa, synthetic construct
GAGDYTTGWLKI

SEQ ID NO: 43936 - protein, 12 aa, synthetic construct
GAGEHTTGWFKI

SEQ ID NO: 43937 - protein, 12 aa, synthetic construct
GAGGEATGWFKI

SEQ ID NO: 43938 - protein, 11 aa, synthetic construct
GAGRGPGWCIL

SEQ ID NO: 43939 - protein, 12 aa, synthetic construct
GAWADKTCWVKI

SEQ ID NO: 43940 - protein, 12 aa, synthetic construct
EAWEHTTGWFKI

SEQ ID NO: 43941 - protein, 14 aa, synthetic construct
EAWDWVYNTGWFNI

SEQ ID NO: 43942 - protein, 11 aa, synthetic construct
EAWDTTGWFKI

SEQ ID NO: 43943 - protein, 13 aa, synthetic construct
EAWDRYTTGWFNI

SEQ ID NO: 43944 - protein, 13 aa, synthetic construct
EAWDQNTTGLVKI

SEQ ID NO: 43945 - protein, 12 aa, synthetic construct
EAWDNGTGWLKI

SEQ ID NO: 43946 - protein, 12 aa, synthetic construct
EAWDKTTGWLNI

SEQ ID NO: 43947 - protein, 10 aa, synthetic construct
EALDWYYNKL

SEQ ID NO: 43948 - protein, 13 aa, synthetic construct
EAGEQNTPGWVNR

SEQ ID NO: 43949 - protein, 11 aa, synthetic construct
EAGDTPGWFKR

SEQ ID NO: 43950 - protein, 13 aa, synthetic construct
EAGDLGTTGGFKK

SEQ ID NO: 43951 - protein, 13 aa, synthetic construct
DTWDLGTTGWFKI

SEQ ID NO: 43952 - protein, 11 aa, synthetic construct
DSWVSTGWLKI

SEQ ID NO: 43953 - protein, 12 aa, synthetic construct
DSWEYGTGWFNI

SEQ ID NO: 43954 - protein, 12 aa, synthetic construct
DSWEEDTGWFKI

SEQ ID NO: 43955 - protein, 13 aa, synthetic construct
DSWDRDNTGWFKI

SEQ ID NO: 43956 - protein, 9 aa, synthetic construct
DSWDFYKKL

SEQ ID NO: 43957 - protein, 12 aa, synthetic construct
GAWDEATGWFKI

SEQ ID NO: 43958 - protein, 9 aa, synthetic construct
GAWDFYKKI

SEQ ID NO: 43959 - protein, 11 aa, synthetic construct
GAWDPTGWLKI

SEQ ID NO: 43960 - protein, 5 aa, synthetic construct
GWFKI

SEQ ID NO: 43961 - protein, 11 aa, synthetic construct
LRGSGPLVGSR

SEQ ID NO: 43962 - protein, 11 aa, synthetic construct
LRGQIPLVRSR

SEQ ID NO: 43963 - protein, 11 aa, synthetic construct
LRGPIPLVGSR

SEQ ID NO: 43964 - protein, 10 aa, synthetic construct
LRGKPLVGSI

SEQ ID NO: 43965 - protein, 13 aa, synthetic construct
LRGIVYIPLVGSR

SEQ ID NO: 43966 - protein, 10 aa, synthetic construct
LRGIPRVGSR

SEQ ID NO: 43967 - protein, 11 aa, synthetic construct
LRGILPLVGSR

SEQ ID NO: 43968 - protein, 11 aa, synthetic construct
LRGIIPRVGSR

SEQ ID NO: 43969 - protein, 12 aa, synthetic construct
LRGIGIQLVGSR

SEQ ID NO: 43970 - protein, 12 aa, synthetic construct
LRGIGIPLVCSR

SEQ ID NO: 43971 - protein, 9 aa, synthetic construct
LRGIFIRNS

SEQ ID NO: 43972 - protein, 12 aa, synthetic construct
LRGIDKPLGGSI

SEQ ID NO: 43973 - protein, 10 aa, synthetic construct
LRGHIIIRNS

SEQ ID NO: 43974 - protein, 8 aa, synthetic construct
LRCQVGSR

SEQ ID NO: 43975 - protein, 13 aa, synthetic construct
GSWDRYTTGLFKI

SEQ ID NO: 43976 - protein, 11 aa, synthetic construct
GAWDTTGWLKI

SEQ ID NO: 43977 - protein, 12 aa, synthetic construct
GPGGWTPGWCKI

SEQ ID NO: 43978 - protein, 11 aa, synthetic construct
GGGTGGGWWWV

SEQ ID NO: 43979 - protein, 12 aa, synthetic construct
GEWEHTTGWLKI

SEQ ID NO: 43980 - protein, 12 aa, synthetic construct
GEWDYTTGWFKI

SEQ ID NO: 43981 - protein, 12 aa, synthetic construct
GEWDYNSGWFKI

SEQ ID NO: 43982 - protein, 12 aa, synthetic construct
GEWDLNTGWLKI

SEQ ID NO: 43983 - protein, 11 aa, synthetic construct
GAWVFTGWFKI

SEQ ID NO: 43984 - protein, 13 aa, synthetic construct
GAWGLRTSGVFKI

SEQ ID NO: 43985 - protein, 11 aa, synthetic construct
GAWENTGLFKI

SEQ ID NO: 43986 - protein, 11 aa, synthetic construct
GAWEHTGGFLI

SEQ ID NO: 43987 - protein, 12 aa, synthetic construct
GAWDYTTGWFKI

SEQ ID NO: 43988 - protein, 12 aa, synthetic construct
GAWDYNTGWFKI

SEQ ID NO: 43989 - protein, 12 aa, synthetic construct
GAWDYGTGWFKI

SEQ ID NO: 43990 - protein, 14 aa, synthetic construct
GAWDWVYTTGWFNI

SEQ ID NO: 43991 - protein, 11 aa, synthetic construct
DSFYTTGWLKI

SEQ ID NO: 43992 - protein, 11 aa, synthetic construct
DGAGGGYYKKL

SEQ ID NO: 43993 - protein, 9 aa, synthetic construct
AAWPVWFKI

SEQ ID NO: 43994 - protein, 11 aa, synthetic construct
DAWDPTVWLQL

SEQ ID NO: 43995 - protein, 11 aa, synthetic construct
DAWDNTGWLKI

SEQ ID NO: 43996 - protein, 14 aa, synthetic construct
DAWDPNNTTGWFNI

SEQ ID NO: 43997 - protein, 14 aa, synthetic construct
DAWDPSHNTGWFNI

SEQ ID NO: 43998 - protein, 14 aa, synthetic construct
DAWDPSHTTGWFKI

SEQ ID NO: 43999 - protein, 11 aa, synthetic construct
DAWDPTGWFKI

SEQ ID NO: 44000 - protein, 11 aa, synthetic construct
DAWDPTGWFKR

SEQ ID NO: 44001 - protein, 13 aa, synthetic construct
DAWDQNTTGCLKI

SEQ ID NO: 44002 - protein, 9 aa, synthetic construct
DEWPGCFKI

SEQ ID NO: 44003 - protein, 13 aa, synthetic construct
DAWDQNTTGLFKI

SEQ ID NO: 44004 - protein, 13 aa, synthetic construct
DAWDQNTTGWLEI

SEQ ID NO: 44005 - protein, 13 aa, synthetic construct
DAWDRDKTGWLNI

SEQ ID NO: 44006 - protein, 13 aa, synthetic construct
DAWDRDNTGWLKI

SEQ ID NO: 44007 - protein, 13 aa, synthetic construct
DAWDRDTTGWFEI

SEQ ID NO: 44008 - protein, 12 aa, synthetic construct
DAWDRNTGWFKI

SEQ ID NO: 44009 - protein, 11 aa, synthetic construct
DAWDNTGWFKI

SEQ ID NO: 44010 - protein, 12 aa, synthetic construct
DAWDNGTGWFKI

SEQ ID NO: 44011 - protein, 10 aa, synthetic construct
DAWDLYYKKL

SEQ ID NO: 44012 - protein, 14 aa, synthetic construct
DAWDLVYTTGWLKI

SEQ ID NO: 44013 - protein, 14 aa, synthetic construct
DAWDLVYTTGWFKI

SEQ ID NO: 44014 - protein, 13 aa, synthetic construct
DAWDLGTTGWFKI

SEQ ID NO: 44015 - protein, 13 aa, synthetic construct
DAWDLGPTGWFKI

SEQ ID NO: 44016 - protein, 10 aa, synthetic construct
DAWDLCYKKI

SEQ ID NO: 44017 - protein, 12 aa, synthetic construct
DAWDLATGWVQL

SEQ ID NO: 44018 - protein, 9 aa, synthetic construct
DAWDFYNKN

SEQ ID NO: 44019 - protein, 12 aa, synthetic construct
DAWDEDTCWFKI

SEQ ID NO: 44020 - protein, 12 aa, synthetic construct
DAWDDTTGWFKI

SEQ ID NO: 44021 - protein, 10 aa, synthetic construct
DAWAWYYKKL

SEQ ID NO: 44022 - protein, 11 aa, synthetic construct
DAWANTGWLKI

SEQ ID NO: 44023 - protein, 11 aa, synthetic construct
DARDTTGWFKI

SEQ ID NO: 44024 - protein, 9 aa, synthetic construct
DALPGWFKI

SEQ ID NO: 44025 - protein, 12 aa, synthetic construct
DALENTTGWFNI

SEQ ID NO: 44026 - protein, 13 aa, synthetic construct
DAWDRYTNGLLKI

SEQ ID NO: 44027 - protein, 13 aa, synthetic construct
DAWDRYTTGWVKI

SEQ ID NO: 44028 - protein, 14 aa, synthetic construct
DAWDTSHTTGWFKI

SEQ ID NO: 44029 - protein, 10 aa, synthetic construct
DAWGLCYKKQ

SEQ ID NO: 44030 - protein, 12 aa, synthetic construct
DEWDYKHCCLKI

SEQ ID NO: 44031 - protein, 13 aa, synthetic construct
DEWDRDTTGGFKI

SEQ ID NO: 44032 - protein, 13 aa, synthetic construct
DEWDQNTTGWLKI

SEQ ID NO: 44033 - protein, 11 aa, synthetic construct
DECDTNGLFNI

SEQ ID NO: 44034 - protein, 14 aa, synthetic construct
DDGDWVYNTGWFKK

SEQ ID NO: 44035 - protein, 11 aa, synthetic construct
DAWVSTGWFKI

SEQ ID NO: 44036 - protein, 11 aa, synthetic construct
DAWVFTGWFKI

SEQ ID NO: 44037 - protein, 11 aa, synthetic construct
DAWVFNGWFKI

SEQ ID NO: 44038 - protein, 9 aa, synthetic construct
DAWPRGFKI

SEQ ID NO: 44039 - protein, 9 aa, synthetic construct
DAWPGWFKL

SEQ ID NO: 44040 - protein, 11 aa, synthetic construct
DAWNGTGWVKI

SEQ ID NO: 44041 - protein, 11 aa, synthetic construct
DAWNGTGWFKI

SEQ ID NO: 44042 - protein, 11 aa, synthetic construct
DAWKGTGCFKI

SEQ ID NO: 44043 - protein, 11 aa, synthetic construct
DAWKGHGWLKI

SEQ ID NO: 44044 - protein, 12 aa, synthetic construct
DAWEYTPGWFKI

SEQ ID NO: 44045 - protein, 11 aa, synthetic construct
DAWDTTGLFKI

SEQ ID NO: 44046 - protein, 12 aa, synthetic construct
DAWEYGTGWFKI

SEQ ID NO: 44047 - protein, 11 aa, synthetic construct
DAWETTGWLKI

SEQ ID NO: 44048 - protein, 11 aa, synthetic construct
DAWETTGLLKI

SEQ ID NO: 44049 - protein, 11 aa, synthetic construct
DAWETTCWFKV

SEQ ID NO: 44050 - protein, 11 aa, synthetic construct
DAWETNGWFKI

SEQ ID NO: 44051 - protein, 12 aa, synthetic construct
DAWEHTTGWFEI

SEQ ID NO: 44052 - protein, 12 aa, synthetic construct
DAWEHTTGGLKI

SEQ ID NO: 44053 - protein, 12 aa, synthetic construct
DAWEHNTGWVKI

SEQ ID NO: 44054 - protein, 12 aa, synthetic construct
DAWDYTTGWFKT

SEQ ID NO: 44055 - protein, 12 aa, synthetic construct
DAWDYTTGWFKI

SEQ ID NO: 44056 - protein, 12 aa, synthetic construct
DAWDYKTGCFKI

SEQ ID NO: 44057 - protein, 10 aa, synthetic construct
DAWDWYYKKL

SEQ ID NO: 44058 - protein, 12 aa, synthetic construct
DAWDWNTGWLKI

SEQ ID NO: 44059 - protein, 11 aa, synthetic construct
DAWDTTGWFNI

SEQ ID NO: 44060 - protein, 12 aa, synthetic construct
LRGTEIPLVGSR

SEQ ID NO: 44061 - protein, 11 aa, synthetic construct
LRGTGALVGSR

SEQ ID NO: 44062 - protein, 11 aa, synthetic construct
LRGTIPLAGSR

SEQ ID NO: 44063 - protein, 12 aa, synthetic construct
SGWDEANGWFKI

SEQ ID NO: 44064 - protein, 12 aa, synthetic construct
SEWDCTTGWFKL

SEQ ID NO: 44065 - protein, 13 aa, synthetic construct
SEWDIGTTGWLKI

SEQ ID NO: 44066 - protein, 11 aa, synthetic construct
SEWDNNVWLKI

SEQ ID NO: 44067 - protein, 12 aa, synthetic construct
SEWDYTTGWSKI

SEQ ID NO: 44068 - protein, 11 aa, synthetic construct
SEWKGQGWFKI

SEQ ID NO: 44069 - protein, 11 aa, synthetic construct
SEWVTKCLFNI

SEQ ID NO: 44070 - protein, 11 aa, synthetic construct
SSAGGGYYKKL

SEQ ID NO: 44071 - protein, 10 aa, synthetic construct
LRGTQQLGST

SEQ ID NO: 44072 - protein, 11 aa, synthetic construct
SSFYTTGWFKI

SEQ ID NO: 44073 - protein, 14 aa, synthetic construct
SSLDLVYTTGWFKK

SEQ ID NO: 44074 - protein, 12 aa, synthetic construct
SSWANTTGWLKI

SEQ ID NO: 44075 - protein, 13 aa, synthetic construct
SSWDQNNNGWFKI

SEQ ID NO: 44076 - protein, 11 aa, synthetic construct
SSWDTTGWFNI

SEQ ID NO: 44077 - protein, 11 aa, synthetic construct
TAAGGGYYKKL

SEQ ID NO: 44078 - protein, 11 aa, synthetic construct
SAWVSTCLFKI

SEQ ID NO: 44079 - protein, 11 aa, synthetic construct
SAWVLTGWFKI

SEQ ID NO: 44080 - protein, 11 aa, synthetic construct
SAWVFTGWLKI

SEQ ID NO: 44081 - protein, 11 aa, synthetic construct
SAWVFTGWCKI

SEQ ID NO: 44082 - protein, 11 aa, synthetic construct
SAWVFTGLFKK

SEQ ID NO: 44083 - protein, 9 aa, synthetic construct
SAWPGWLKI

SEQ ID NO: 44084 - protein, 10 aa, synthetic construct
SAWGWYYNKL

SEQ ID NO: 44085 - protein, 14 aa, synthetic construct
SAWGWVYNTGWFKI

SEQ ID NO: 44086 - protein, 13 aa, synthetic construct
SAWGRYTTGLFKI

SEQ ID NO: 44087 - protein, 12 aa, synthetic construct
SAWEYTTGWLKI

SEQ ID NO: 44088 - protein, 11 aa, synthetic construct
SAWETTGWFKI

SEQ ID NO: 44089 - protein, 11 aa, synthetic construct
SAWETPGWCKI

SEQ ID NO: 44090 - protein, 12 aa, synthetic construct
SAWENTNGWLKI

SEQ ID NO: 44091 - protein, 9 aa, synthetic construct
SAWEFYKKL

SEQ ID NO: 44092 - protein, 12 aa, synthetic construct
SAWEEATGWFKI

SEQ ID NO: 44093 - protein, 13 aa, synthetic construct
SAWDYRGTGLFKI

SEQ ID NO: 44094 - protein, 12 aa, synthetic construct
SAWDYGTGWLKI

SEQ ID NO: 44095 - protein, 12 aa, synthetic construct
TAWANTTGWFKI

SEQ ID NO: 44096 - protein, 14 aa, synthetic construct
TAWDCVYTTGWFKI

SEQ ID NO: 44097 - protein, 12 aa, synthetic construct
TAWDHTTGWFKI

SEQ ID NO: 44098 - protein, 12 aa, synthetic construct
VAWDEATGWFKI

SEQ ID NO: 44099 - protein, 12 aa, synthetic construct
VTWDYTTGWFKI

SEQ ID NO: 44100 - protein, 9 aa, synthetic construct
VSWDFYKKL

SEQ ID NO: 44101 - protein, 9 aa, synthetic construct
VGWDIFKKL

SEQ ID NO: 44102 - protein, 12 aa, synthetic construct
VGWDEATGWFKI

SEQ ID NO: 44103 - protein, 11 aa, synthetic construct
VGGGGRGGECW

SEQ ID NO: 44104 - protein, 9 aa, synthetic construct
VAWPGWFKK

SEQ ID NO: 44105 - protein, 11 aa, synthetic construct
VAWKGTGWFKI

SEQ ID NO: 44106 - protein, 10 aa, synthetic construct
VAWDWYYKKL

SEQ ID NO: 44107 - protein, 12 aa, synthetic construct
VAWDWTTGWFKI

SEQ ID NO: 44108 - protein, 13 aa, synthetic construct
VAWDRYTTGWFKI

SEQ ID NO: 44109 - protein, 13 aa, synthetic construct
VAWDRNTTGWFKI

SEQ ID NO: 44110 - protein, 13 aa, synthetic construct
VAWDQNTTGWFKI

SEQ ID NO: 44111 - protein, 11 aa, synthetic construct
VAWDPTGWFKI

SEQ ID NO: 44112 - protein, 13 aa, synthetic construct
VAWDLGTTCWFKI

SEQ ID NO: 44113 - protein, 12 aa, synthetic construct
VAWANTTGWFKI

SEQ ID NO: 44114 - protein, 13 aa, synthetic construct
TAWDLGTTGWFKI

SEQ ID NO: 44115 - protein, 11 aa, synthetic construct
VARDTTGWFKI

SEQ ID NO: 44116 - protein, 11 aa, synthetic construct
VALYTTGWFKI

SEQ ID NO: 44117 - protein, 12 aa, synthetic construct
VACDWTTGWFKI

SEQ ID NO: 44118 - protein, 11 aa, synthetic construct
VAAGGGYYKKL

SEQ ID NO: 44119 - protein, 11 aa, synthetic construct
TAWVSTGWFKI

SEQ ID NO: 44120 - protein, 12 aa, synthetic construct
TAWGHTTGWFKI

SEQ ID NO: 44121 - protein, 11 aa, synthetic construct
TAWETTGWFKI

SEQ ID NO: 44122 - protein, 10 aa, synthetic construct
TAWDWYYKKL

SEQ ID NO: 44123 - protein, 10 aa, synthetic construct
TAWDWDYKKL

SEQ ID NO: 44124 - protein, 12 aa, synthetic construct
TAWDRGTGWFKI

SEQ ID NO: 44125 - protein, 13 aa, synthetic construct
TAWDRDTTGWFKI

SEQ ID NO: 44126 - protein, 13 aa, synthetic construct
TAWDQNTTGWFKI

SEQ ID NO: 44127 - protein, 11 aa, synthetic construct
TAWDPTGWFKI

SEQ ID NO: 44128 - protein, 14 aa, synthetic construct
TAWDPSHTTGWFKI

SEQ ID NO: 44129 - protein, 10 aa, synthetic construct
SAWDWYYNKI

SEQ ID NO: 44130 - protein, 10 aa, synthetic construct
SAWDWYYKKL

SEQ ID NO: 44131 - protein, 10 aa, synthetic construct
SAWDWYYKKI

SEQ ID NO: 44132 - protein, 11 aa, synthetic construct
SAEGGGYYKKH

SEQ ID NO: 44133 - protein, 12 aa, synthetic construct
SARGWTTGWFNK

SEQ ID NO: 44134 - protein, 13 aa, synthetic construct
SARDRDTTRCFNI

SEQ ID NO: 44135 - protein, 11 aa, synthetic construct
SARDPTGWFKI

SEQ ID NO: 44136 - protein, 14 aa, synthetic construct
SALYWVHNTGWFKI

SEQ ID NO: 44137 - protein, 11 aa, synthetic construct
SALYTNGWFKI

SEQ ID NO: 44138 - protein, 12 aa, synthetic construct
SALDYVTGLFNI

SEQ ID NO: 44139 - protein, 12 aa, synthetic construct
SALDYTTVWFNI

SEQ ID NO: 44140 - protein, 11 aa, synthetic construct
SAGGGGYYKKL

SEQ ID NO: 44141 - protein, 14 aa, synthetic construct
SAGDWVYNTGWFNI

SEQ ID NO: 44142 - protein, 13 aa, synthetic construct
SAGDLGNTCLFKI

SEQ ID NO: 44143 - protein, 14 aa, synthetic construct
SAGALVYTTGWFNI

SEQ ID NO: 44144 - protein, 11 aa, synthetic construct
SAFYTTGWFKV

SEQ ID NO: 44145 - protein, 11 aa, synthetic construct
SAFYTHGWFKI

SEQ ID NO: 44146 - protein, 11 aa, synthetic construct
SAFNTKLWLNI

SEQ ID NO: 44147 - protein, 12 aa, synthetic construct
SACDNNTGWFNI

SEQ ID NO: 44148 - protein, 12 aa, synthetic construct
SAWANTTCWLKI

SEQ ID NO: 44149 - protein, 11 aa, synthetic construct
SAAWGGYYKKH

SEQ ID NO: 44150 - protein, 11 aa, synthetic construct
SAAGGGYYNKL

SEQ ID NO: 44151 - protein, 11 aa, synthetic construct
SAAGGGDYNKL

SEQ ID NO: 44152 - protein, 11 aa, synthetic construct
PRGMIQRVGSR

SEQ ID NO: 44153 - protein, 11 aa, synthetic construct
PRGIIPLVGSR

SEQ ID NO: 44154 - protein, 13 aa, synthetic construct
PRGIGYIPLVGSR

SEQ ID NO: 44155 - protein, 13 aa, synthetic construct
PAWDIGTTGWFKK

SEQ ID NO: 44156 - protein, 13 aa, synthetic construct
PAGVLGTTGWFKI

SEQ ID NO: 44157 - protein, 13 aa, synthetic construct
LSGIGYIPLVGSR

SEQ ID NO: 44158 - protein, 12 aa, synthetic construct
LSGIDIPLVGSI

SEQ ID NO: 44159 - protein, 10 aa, synthetic construct
LRYTTGWLKI

SEQ ID NO: 44160 - protein, 10 aa, synthetic construct
LRYTTGWFKI

SEQ ID NO: 44161 - protein, 11 aa, synthetic construct
LRWTIPLVGSR

SEQ ID NO: 44162 - protein, 11 aa, synthetic construct
LRWIIPLVGSR

SEQ ID NO: 44163 - protein, 12 aa, synthetic construct
SAWANTNCWFKI

SEQ ID NO: 44164 - protein, 12 aa, synthetic construct
SAWANTTGLLKI

SEQ ID NO: 44165 - protein, 14 aa, synthetic construct
SAWDWVYTTGWLKI

SEQ ID NO: 44166 - protein, 10 aa, synthetic construct
SAWDPYRFKI

SEQ ID NO: 44167 - protein, 14 aa, synthetic construct
SAWDWVYTTGWFKI

SEQ ID NO: 44168 - protein, 14 aa, synthetic construct
SAWDWVYTNGLFKI

SEQ ID NO: 44169 - protein, 10 aa, synthetic construct
SAWDWCYKKH

SEQ ID NO: 44170 - protein, 13 aa, synthetic construct
SAWDVGTTGWFKI

SEQ ID NO: 44171 - protein, 11 aa, synthetic construct
SAWDTTGCFKI

SEQ ID NO: 44172 - protein, 13 aa, synthetic construct
SAWDSHTTGWFNI

SEQ ID NO: 44173 - protein, 13 aa, synthetic construct
SAWDRYTTGWLKI

SEQ ID NO: 44174 - protein, 13 aa, synthetic construct
SAWDRYTTGCFKI

SEQ ID NO: 44175 - protein, 13 aa, synthetic construct
SAWDRYNTGWLNI

SEQ ID NO: 44176 - protein, 13 aa, synthetic construct
SAWDRYNTGLFKI

SEQ ID NO: 44177 - protein, 12 aa, synthetic construct
SAWDRGTCWLKI

SEQ ID NO: 44178 - protein, 13 aa, synthetic construct
SAWDRDTTGWLKI

SEQ ID NO: 44179 - protein, 13 aa, synthetic construct
SAWDRDTTGLFKI

SEQ ID NO: 44180 - protein, 13 aa, synthetic construct
SAWDRDNTGWFEI

SEQ ID NO: 44181 - protein, 11 aa, synthetic construct
SAWDPTGWLKI

SEQ ID NO: 44182 - protein, 12 aa, synthetic construct
SAWANTTGWFKI

SEQ ID NO: 44183 - protein, 11 aa, synthetic construct
SAWDPTGWFKI

SEQ ID NO: 44184 - protein, 11 aa, synthetic construct
SAWDPTGLFKI

SEQ ID NO: 44185 - protein, 11 aa, synthetic construct
SAWDPTGCFKI

SEQ ID NO: 44186 - protein, 11 aa, synthetic construct
SAWDNTWWFKI

SEQ ID NO: 44187 - protein, 11 aa, synthetic construct
SAWDNTGWFKI

SEQ ID NO: 44188 - protein, 12 aa, synthetic construct
SAWDNKTGWFKI

SEQ ID NO: 44189 - protein, 13 aa, synthetic construct
SAWDMETTGLLKK

SEQ ID NO: 44190 - protein, 13 aa, synthetic construct
SAWDLVTTGWFKI

SEQ ID NO: 44191 - protein, 12 aa, synthetic construct
SAWDLSTGWFKI

SEQ ID NO: 44192 - protein, 9 aa, synthetic construct
SAWDFYNKL

SEQ ID NO: 44193 - protein, 9 aa, synthetic construct
SAWDFYKKL

SEQ ID NO: 44194 - protein, 12 aa, synthetic construct
SAWDEANGWLKI

SEQ ID NO: 44195 - protein, 14 aa, synthetic construct
SAWAWVYTTGLFKI

SEQ ID NO: 44196 - protein, 11 aa, synthetic construct
SAWAPTGWFKI

SEQ ID NO: 44197 - protein, 14 aa, synthetic construct
DALDWVYNTGWFKK

SEQ ID NO: 44198 - protein, 11 aa, synthetic construct
DAIYTTGWFKI

SEQ ID NO: 44199 - protein, 9 aa, synthetic construct
DAGPGLFKR

SEQ ID NO: 44200 - protein, 11 aa, synthetic construct
AAYSTTGWFKI

SEQ ID NO: 44201 - protein, 9 aa, synthetic construct
AAWYFYKKL

SEQ ID NO: 44202 - protein, 14 aa, synthetic construct
AAWYPSPTTGWFKI

SEQ ID NO: 44203 - protein, 12 aa, synthetic construct
AAWYRGTGWFQI

SEQ ID NO: 44204 - protein, 13 aa, synthetic construct
AAWYRYTTGWFKI

SEQ ID NO: 44205 - protein, 12 aa, synthetic construct
AAWYYPTGWFKI

SEQ ID NO: 44206 - protein, 9 aa, synthetic construct
AAWYYYKKL

SEQ ID NO: 44207 - protein, 11 aa, synthetic construct
AEFYTTGWFKI

SEQ ID NO: 44208 - protein, 11 aa, synthetic construct
AGFYTTGWLKI

SEQ ID NO: 44209 - protein, 13 aa, synthetic construct
AEGDRYTTGWLKI

SEQ ID NO: 44210 - protein, 11 aa, synthetic construct
AEGDTTRWFEI

SEQ ID NO: 44211 - protein, 12 aa, synthetic construct
AEGGYTTGWFKI

SEQ ID NO: 44212 - protein, 10 aa, synthetic construct
AAWELYYKKL

SEQ ID NO: 44213 - protein, 12 aa, synthetic construct
AELDYTTGLFKK

SEQ ID NO: 44214 - protein, 11 aa, synthetic construct
AELNTTCCFKI

SEQ ID NO: 44215 - protein, 12 aa, synthetic construct
AAWYEAAGWFKI

SEQ ID NO: 44216 - protein, 11 aa, synthetic construct
AAWWTTGWFKI

SEQ ID NO: 44217 - protein, 12 aa, synthetic construct
AAWVYTTGWFKI

SEQ ID NO: 44218 - protein, 11 aa, synthetic construct
AAWVYTGWFNI

SEQ ID NO: 44219 - protein, 11 aa, synthetic construct
AAWVYTGCFKI

SEQ ID NO: 44220 - protein, 11 aa, synthetic construct
AAWVYRGLLNI

SEQ ID NO: 44221 - protein, 12 aa, synthetic construct
AAWVYPTGWFKI

SEQ ID NO: 44222 - protein, 11 aa, synthetic construct
AAWVYHWWFKI

SEQ ID NO: 44223 - protein, 11 aa, synthetic construct
AAWVYHCWFKI

SEQ ID NO: 44224 - protein, 8 aa, synthetic construct
AAWVYEKL

SEQ ID NO: 44225 - protein, 11 aa, synthetic construct
AAWVVTGWLKI

SEQ ID NO: 44226 - protein, 11 aa, synthetic construct
AAWVTTGCVTI

SEQ ID NO: 44227 - protein, 11 aa, synthetic construct
AAWVTPGWIEI

SEQ ID NO: 44228 - protein, 10 aa, synthetic construct
AAWVTGWFKI

SEQ ID NO: 44229 - protein, 12 aa, synthetic construct
AAWVSTTGWFKI

SEQ ID NO: 44230 - protein, 11 aa, synthetic construct
AAWVSTGWYKI

SEQ ID NO: 44231 - protein, 11 aa, synthetic construct
AAWVSTGWWQI

SEQ ID NO: 44232 - protein, 9 aa, synthetic construct
AELPGWLKI

SEQ ID NO: 44233 - protein, 11 aa, synthetic construct
AELVYTGWFTI

SEQ ID NO: 44234 - protein, 11 aa, synthetic construct
AELYNNGWLNI

SEQ ID NO: 44235 - protein, 12 aa, synthetic construct
AEWDWTTGWLKI

SEQ ID NO: 44236 - protein, 10 aa, synthetic construct
AFYTTGWFKI

SEQ ID NO: 44237 - protein, 11 aa, synthetic construct
AEWVSTGWFKI

SEQ ID NO: 44238 - protein, 11 aa, synthetic construct
AEWVITGWFNI

SEQ ID NO: 44239 - protein, 11 aa, synthetic construct
AEWNGTGWFKI

SEQ ID NO: 44240 - protein, 11 aa, synthetic construct
AEWKGTGWLKI

SEQ ID NO: 44241 - protein, 12 aa, synthetic construct
AEWGYNTGWFKI

SEQ ID NO: 44242 - protein, 11 aa, synthetic construct
AEWETTGWFKI

SEQ ID NO: 44243 - protein, 12 aa, synthetic construct
AEWEHNTCCLKI

SEQ ID NO: 44244 - protein, 12 aa, synthetic construct
AEWDYVTGLLKI

SEQ ID NO: 44245 - protein, 12 aa, synthetic construct
AEWDYTTGWFKI

SEQ ID NO: 44246 - protein, 12 aa, synthetic construct
AEWDYTPCWFKI

SEQ ID NO: 44247 - protein, 12 aa, synthetic construct
AEWDYGNGWLKI

SEQ ID NO: 44248 - protein, 10 aa, synthetic construct
AEWDWYYKKL

SEQ ID NO: 44249 - protein, 10 aa, synthetic construct
AEWDWYYKKH

SEQ ID NO: 44250 - protein, 12 aa, synthetic construct
AEWDWKTGWFKI

SEQ ID NO: 44251 - protein, 12 aa, synthetic construct
AEWANNTGWFKI

SEQ ID NO: 44252 - protein, 11 aa, synthetic construct
AEWDTTGWFKI

SEQ ID NO: 44253 - protein, 11 aa, synthetic construct
AEWDTTGLFKI

SEQ ID NO: 44254 - protein, 13 aa, synthetic construct
AEWDRYTTGWFKI

SEQ ID NO: 44255 - protein, 13 aa, synthetic construct
AEWDRNTTGWIKI

SEQ ID NO: 44256 - protein, 13 aa, synthetic construct
AEWDRKTTGWFKI

SEQ ID NO: 44257 - protein, 12 aa, synthetic construct
AEWDRGTGWLKI

SEQ ID NO: 44258 - protein, 13 aa, synthetic construct
AEWDRDTTGWFKI

SEQ ID NO: 44259 - protein, 13 aa, synthetic construct
AEWDRDNTGWFKI

SEQ ID NO: 44260 - protein, 12 aa, synthetic construct
AEWDLTTGWFKI

SEQ ID NO: 44261 - protein, 13 aa, synthetic construct
AEWDLGTTGWFRI

SEQ ID NO: 44262 - protein, 13 aa, synthetic construct
AEWDLGTTGWFKI

SEQ ID NO: 44263 - protein, 13 aa, synthetic construct
AEWDLGNTGWFKI

SEQ ID NO: 44264 - protein, 12 aa, synthetic construct
AEWDEATGLLKI

SEQ ID NO: 44265 - protein, 12 aa, synthetic construct
AEWAYTTGWVEI

SEQ ID NO: 44266 - protein, 11 aa, synthetic construct
AAWVSTGWRKI

SEQ ID NO: 44267 - protein, 11 aa, synthetic construct
AAWVSTGWIKV

SEQ ID NO: 44268 - protein, 11 aa, synthetic construct
AAWVSTGWIKI

SEQ ID NO: 44269 - protein, 12 aa, synthetic construct
AAWVEATGWFKI

SEQ ID NO: 44270 - protein, 11 aa, synthetic construct
AAWVFTGWYKI

SEQ ID NO: 44271 - protein, 11 aa, synthetic construct
AAWVFTGWIKI

SEQ ID NO: 44272 - protein, 11 aa, synthetic construct
AAWVFTGWFTI

SEQ ID NO: 44273 - protein, 11 aa, synthetic construct
AAWVFTGWFRI

SEQ ID NO: 44274 - protein, 11 aa, synthetic construct
AAWVFTGWFMI

SEQ ID NO: 44275 - protein, 11 aa, synthetic construct
AAWVFTGWFKR

SEQ ID NO: 44276 - protein, 10 aa, synthetic construct
AAWVFTGWFK

SEQ ID NO: 44277 - protein, 11 aa, synthetic construct
AAWVFTGLFNI

SEQ ID NO: 44278 - protein, 11 aa, synthetic construct
AAWVFTGCFKI

SEQ ID NO: 44279 - protein, 11 aa, synthetic construct
AAWVFTAGFKI

SEQ ID NO: 44280 - protein, 11 aa, synthetic construct
AAWVFPGWFKI

SEQ ID NO: 44281 - protein, 11 aa, synthetic construct
AAWVFKGLFKL

SEQ ID NO: 44282 - protein, 11 aa, synthetic construct
AAWVFIGWFKI

SEQ ID NO: 44283 - protein, 9 aa, synthetic construct
AAWVFFKKL

SEQ ID NO: 44284 - protein, 12 aa, synthetic construct
AAWVDTTGWFKI

SEQ ID NO: 44285 - protein, 12 aa, synthetic construct
AAWVHPAGWFKI

SEQ ID NO: 44286 - protein, 11 aa, synthetic construct
AAWVCTGWFKI

SEQ ID NO: 44287 - protein, 11 aa, synthetic construct
AAWVATGWFKI

SEQ ID NO: 44288 - protein, 11 aa, synthetic construct
AAWVATGWFEI

SEQ ID NO: 44289 - protein, 11 aa, synthetic construct
AAWVAPGGFKI

SEQ ID NO: 44290 - protein, 12 aa, synthetic construct
AAWTYTTGWFKI

SEQ ID NO: 44291 - protein, 13 aa, synthetic construct
AAWTRDTTGWFKI

SEQ ID NO: 44292 - protein, 11 aa, synthetic construct
AAWTGTGWVKI

SEQ ID NO: 44293 - protein, 11 aa, synthetic construct
AAWTGTGGFKI

SEQ ID NO: 44294 - protein, 9 aa, synthetic construct
AAWTDYKKL

SEQ ID NO: 44295 - protein, 10 aa, synthetic construct
AAWSTGWLKI

SEQ ID NO: 44296 - protein, 12 aa, synthetic construct
AAWSNTTGWFKI

SEQ ID NO: 44297 - protein, 11 aa, synthetic construct
AAWRGTGWFMI

SEQ ID NO: 44298 - protein, 10 aa, synthetic construct
AAWRCGWLNI

SEQ ID NO: 44299 - protein, 11 aa, synthetic construct
AAWQGTGWFKI

SEQ ID NO: 44300 - protein, 12 aa, synthetic construct
AAWVGTTGWFKI

SEQ ID NO: 44301 - protein, 11 aa, synthetic construct
AAWVINGWFKI

SEQ ID NO: 44302 - protein, 11 aa, synthetic construct
AAWVSTGWFTI

SEQ ID NO: 44303 - protein, 12 aa, synthetic construct
AAWVRTTGWFKI

SEQ ID NO: 44304 - protein, 11 aa, synthetic construct
AAWVSTGWFMI

SEQ ID NO: 44305 - protein, 11 aa, synthetic construct
AAWVSTGWFKL

SEQ ID NO: 44306 - protein, 11 aa, synthetic construct
AAWVSTGWFKK

SEQ ID NO: 44307 - protein, 11 aa, synthetic construct
AAWVSTGWFEV

SEQ ID NO: 44308 - protein, 11 aa, synthetic construct
AAWVSTGSFKI

SEQ ID NO: 44309 - protein, 11 aa, synthetic construct
AAWVSTGLSKI

SEQ ID NO: 44310 - protein, 11 aa, synthetic construct
AAWVSTGLLKI

SEQ ID NO: 44311 - protein, 11 aa, synthetic construct
AAWVSTGGVTI

SEQ ID NO: 44312 - protein, 11 aa, synthetic construct
AAWVSTDWFKI

SEQ ID NO: 44313 - protein, 11 aa, synthetic construct
AAWVSTCWFKI

SEQ ID NO: 44314 - protein, 11 aa, synthetic construct
AAWVSNGGFKI

SEQ ID NO: 44315 - protein, 11 aa, synthetic construct
AAWVSNCWFKI

SEQ ID NO: 44316 - protein, 11 aa, synthetic construct
AAWVSKGWFKR

SEQ ID NO: 44317 - protein, 13 aa, synthetic construct
AAWVRYTTGWFKI

SEQ ID NO: 44318 - protein, 11 aa, synthetic construct
AAWVPTGWLKL

SEQ ID NO: 44319 - protein, 13 aa, synthetic construct
AAWVLGTTGWFKI

SEQ ID NO: 44320 - protein, 14 aa, synthetic construct
AAWVPSQTTGWLKI

SEQ ID NO: 44321 - protein, 11 aa, synthetic construct
AAWVPPGWFKI

SEQ ID NO: 44322 - protein, 11 aa, synthetic construct
AAWVNTGWFKI

SEQ ID NO: 44323 - protein, 13 aa, synthetic construct
AAWVLVTTGWFKI

SEQ ID NO: 44324 - protein, 11 aa, synthetic construct
AAWVLTGWLKI

SEQ ID NO: 44325 - protein, 11 aa, synthetic construct
AAWVLTGWFEI

SEQ ID NO: 44326 - protein, 11 aa, synthetic construct
AAWVLTGLFKR

SEQ ID NO: 44327 - protein, 11 aa, synthetic construct
AAWVLTGLFKI

SEQ ID NO: 44328 - protein, 11 aa, synthetic construct
AAWVLTCWYNI

SEQ ID NO: 44329 - protein, 11 aa, synthetic construct
AAWVLTCWLKI

SEQ ID NO: 44330 - protein, 11 aa, synthetic construct
AAWVLTCLFKI

SEQ ID NO: 44331 - protein, 11 aa, synthetic construct
AAWVLNGWFKK

SEQ ID NO: 44332 - protein, 11 aa, synthetic construct
AAWVLHCWLKL

SEQ ID NO: 44333 - protein, 13 aa, synthetic construct
AAWVLGTTGWFKL

SEQ ID NO: 44334 - protein, 11 aa, synthetic construct
AGAGGGYYKKL

SEQ ID NO: 44335 - protein, 12 aa, synthetic construct
AGGDYGTGWFKI

SEQ ID NO: 44336 - protein, 13 aa, synthetic construct
DAGDLGTTGWFKI

SEQ ID NO: 44337 - protein, 9 aa, synthetic construct
ASWPGLLKI

SEQ ID NO: 44338 - protein, 12 aa, synthetic construct
ASWEETTGWFNI

SEQ ID NO: 44339 - protein, 12 aa, synthetic construct
ASWEHTTGWSKI

SEQ ID NO: 44340 - protein, 11 aa, synthetic construct
ASWEPTGWFKI

SEQ ID NO: 44341 - protein, 11 aa, synthetic construct
ASWHGPGWFKI

SEQ ID NO: 44342 - protein, 11 aa, synthetic construct
ASWKGTRLFKK

SEQ ID NO: 44343 - protein, 11 aa, synthetic construct
ASWKRTGGAKI

SEQ ID NO: 44344 - protein, 9 aa, synthetic construct
ASWPGWFKI

SEQ ID NO: 44345 - protein, 11 aa, synthetic construct
AGGKGTGWVTV

SEQ ID NO: 44346 - protein, 13 aa, synthetic construct
ATGALGTTGWFKI

SEQ ID NO: 44347 - protein, 12 aa, synthetic construct
ATRANTTGWFKI

SEQ ID NO: 44348 - protein, 12 aa, synthetic construct
ATWANTTGWFKI

SEQ ID NO: 44349 - protein, 12 aa, synthetic construct
ATWDEATGWFKI

SEQ ID NO: 44350 - protein, 9 aa, synthetic construct
ATWDFYKKL

SEQ ID NO: 44351 - protein, 11 aa, synthetic construct
ATWDPAGWFKI

SEQ ID NO: 44352 - protein, 12 aa, synthetic construct
ASWDYWTGWFKI

SEQ ID NO: 44353 - protein, 12 aa, synthetic construct
ASWDYTTGCLKI

SEQ ID NO: 44354 - protein, 12 aa, synthetic construct
ASWDYPTGWFKI

SEQ ID NO: 44355 - protein, 12 aa, synthetic construct
ASWDYPNGWFKI

SEQ ID NO: 44356 - protein, 12 aa, synthetic construct
ASWDYHTGWFKI

SEQ ID NO: 44357 - protein, 10 aa, synthetic construct
ASWDWYYKKL

SEQ ID NO: 44358 - protein, 14 aa, synthetic construct
ASWDWVYNTVWLKI

SEQ ID NO: 44359 - protein, 12 aa, synthetic construct
ASWDWTPGWFKI

SEQ ID NO: 44360 - protein, 12 aa, synthetic construct
ASWDWNTGWFNI

SEQ ID NO: 44361 - protein, 13 aa, synthetic construct
ASWDWDNNGLFKI

SEQ ID NO: 44362 - protein, 11 aa, synthetic construct
ASWDTTGLFKI

SEQ ID NO: 44363 - protein, 11 aa, synthetic construct
ASWDTPGWFKI

SEQ ID NO: 44364 - protein, 11 aa, synthetic construct
ASWDTNGWIKT

SEQ ID NO: 44365 - protein, 13 aa, synthetic construct
ASWDRYNNGWLNI

SEQ ID NO: 44366 - protein, 12 aa, synthetic construct
ASWDRGTGWLKI

SEQ ID NO: 44367 - protein, 12 aa, synthetic construct
ASWDRGKGWFNI

SEQ ID NO: 44368 - protein, 13 aa, synthetic construct
ASWDRETTGWFNI

SEQ ID NO: 44369 - protein, 13 aa, synthetic construct
ATWDRDTTGWFKI

SEQ ID NO: 44370 - protein, 12 aa, synthetic construct
ATWDRNTGWFKI

SEQ ID NO: 44371 - protein, 8 aa, synthetic construct
ATWDYTTG

SEQ ID NO: 44372 - protein, 11 aa, synthetic construct
AVWKGTGWFKI

SEQ ID NO: 44373 - protein, 9 aa, synthetic construct
DAGDFYKKL

SEQ ID NO: 44374 - protein, 12 aa, synthetic construct
DAGDEAPGWLQI

SEQ ID NO: 44375 - protein, 11 aa, synthetic construct
DAFYTTGWFNI

SEQ ID NO: 44376 - protein, 11 aa, synthetic construct
DAFYTTGWFKI

SEQ ID NO: 44377 - protein, 11 aa, synthetic construct
DACVSTGWFKI

SEQ ID NO: 44378 - protein, 11 aa, synthetic construct
DACVITGWFKI

SEQ ID NO: 44379 - protein, 12 aa, synthetic construct
DACDYNTGWFKI

SEQ ID NO: 44380 - protein, 12 aa, synthetic construct
DACDYHTGWLKI

SEQ ID NO: 44381 - protein, 11 aa, synthetic construct
DAAGGGYYKKL

SEQ ID NO: 44382 - protein, 12 aa, synthetic construct
CVGSIYHWLVQD

SEQ ID NO: 44383 - protein, 10 aa, synthetic construct
CVGLHWLVQD

SEQ ID NO: 44384 - protein, 12 aa, synthetic construct
CEWDYTTCWFKI

SEQ ID NO: 44385 - protein, 14 aa, synthetic construct
AYWDWVYNTGWLKK

SEQ ID NO: 44386 - protein, 11 aa, synthetic construct
AVWVFTGWFKI

SEQ ID NO: 44387 - protein, 10 aa, synthetic construct
AVWEWSYKKL

SEQ ID NO: 44388 - protein, 13 aa, synthetic construct
ATWELGTTGWFKI

SEQ ID NO: 44389 - protein, 12 aa, synthetic construct
AVWEHTTGWFKI

SEQ ID NO: 44390 - protein, 12 aa, synthetic construct
AVWDYPTGWFKI

SEQ ID NO: 44391 - protein, 12 aa, synthetic construct
AVWDYPTCWFKI

SEQ ID NO: 44392 - protein, 11 aa, synthetic construct
AVWDTTGWFKT

SEQ ID NO: 44393 - protein, 13 aa, synthetic construct
AVWDRDATGWFKI

SEQ ID NO: 44394 - protein, 11 aa, synthetic construct
AVWDPTGWFKI

SEQ ID NO: 44395 - protein, 14 aa, synthetic construct
AVWDPSHTTGWFKI

SEQ ID NO: 44396 - protein, 11 aa, synthetic construct
AVWDNTGWFKI

SEQ ID NO: 44397 - protein, 9 aa, synthetic construct
AVWDFYKKL

SEQ ID NO: 44398 - protein, 12 aa, synthetic construct
AVWDCTTGWFKV

SEQ ID NO: 44399 - protein, 12 aa, synthetic construct
AVWANTTGWFKI

SEQ ID NO: 44400 - protein, 11 aa, synthetic construct
ATWTGTGWFKI

SEQ ID NO: 44401 - protein, 11 aa, synthetic construct
ATWMATGWFKI

SEQ ID NO: 44402 - protein, 13 aa, synthetic construct
ATWERDTTGWFKI

SEQ ID NO: 44403 - protein, 13 aa, synthetic construct
ASWDRDTTVLFKI

SEQ ID NO: 44404 - protein, 13 aa, synthetic construct
ASWDRDTTGWFNI

SEQ ID NO: 44405 - protein, 13 aa, synthetic construct
ASWDRDTTGWFKI

SEQ ID NO: 44406 - protein, 12 aa, synthetic construct
AGWDYVTGWLKI

SEQ ID NO: 44407 - protein, 13 aa, synthetic construct
APWDQKTTGWYNI

SEQ ID NO: 44408 - protein, 10 aa, synthetic construct
AKNTTGWFKI

SEQ ID NO: 44409 - skipped

SEQ ID NO: 44410 - protein, 11 aa, synthetic construct
AGWVFTGLFNI

SEQ ID NO: 44411 - protein, 11 aa, synthetic construct
AGWRGTGWFKI

SEQ ID NO: 44412 - protein, 9 aa, synthetic construct
AGWPGWFKI

SEQ ID NO: 44413 - protein, 11 aa, synthetic construct
AGWKGTGWLKI

SEQ ID NO: 44414 - protein, 12 aa, synthetic construct
AGWGYITGWFKI

SEQ ID NO: 44415 - protein, 14 aa, synthetic construct
AGWGWVYTTGWFKI

SEQ ID NO: 44416 - protein, 10 aa, synthetic construct
AGWGSGWFRI

SEQ ID NO: 44417 - protein, 8 aa, synthetic construct
AGWGRYTT

SEQ ID NO: 44418 - protein, 13 aa, synthetic construct
AGWGLGTTGWFKI

SEQ ID NO: 44419 - protein, 12 aa, synthetic construct
AGWEHTTGWFKI

SEQ ID NO: 44420 - protein, 12 aa, synthetic construct
AGWEHTTGWFEI

SEQ ID NO: 44421 - protein, 12 aa, synthetic construct
AGWDYGTGWLKI

SEQ ID NO: 44422 - protein, 11 aa, synthetic construct
APWKGTGWCKK

SEQ ID NO: 44423 - protein, 12 aa, synthetic construct
AGWDYGTCWFKI

SEQ ID NO: 44424 - protein, 14 aa, synthetic construct
AGWDWVYTTSWFKI

SEQ ID NO: 44425 - protein, 13 aa, synthetic construct
AGWDWVTTGWFKI

SEQ ID NO: 44426 - protein, 12 aa, synthetic construct
AGWDWTTGWFKI

SEQ ID NO: 44427 - protein, 12 aa, synthetic construct
AGWDRGTGWFKI

SEQ ID NO: 44428 - protein, 12 aa, synthetic construct
AGWDRGPGWFKI

SEQ ID NO: 44429 - protein, 13 aa, synthetic construct
AGWDRDTTGWFKI

SEQ ID NO: 44430 - protein, 13 aa, synthetic construct
AGWDQNNAWWFKI

SEQ ID NO: 44431 - protein, 14 aa, synthetic construct
AGWDPSHTTGWFKI

SEQ ID NO: 44432 - protein, 11 aa, synthetic construct
AGWDNAGWFKI

SEQ ID NO: 44433 - protein, 13 aa, synthetic construct
AGWDLGTTGWSKI

SEQ ID NO: 44434 - protein, 12 aa, synthetic construct
AGWDEATGWFNI

SEQ ID NO: 44435 - protein, 12 aa, synthetic construct
AGWANTTGWLKI

SEQ ID NO: 44436 - protein, 11 aa, synthetic construct
AGRETTGWFKI

SEQ ID NO: 44437 - protein, 12 aa, synthetic construct
APWDRGTGWFKI

SEQ ID NO: 44438 - protein, 11 aa, synthetic construct
ASAGGGYYKKI

SEQ ID NO: 44439 - protein, 13 aa, synthetic construct
ASWDRDTTGWCKI

SEQ ID NO: 44440 - protein, 12 aa, synthetic construct
ASWDEATGLFKI

SEQ ID NO: 44441 - protein, 13 aa, synthetic construct
ASWDRDTTCWFKI

SEQ ID NO: 44442 - protein, 13 aa, synthetic construct
ASWDRDNTGLFKI

SEQ ID NO: 44443 - protein, 11 aa, synthetic construct
ASWDPTGWFKI

SEQ ID NO: 44444 - protein, 11 aa, synthetic construct
ASWDPTGLFKI

SEQ ID NO: 44445 - protein, 14 aa, synthetic construct
ASWDPSHTTGWFKI

SEQ ID NO: 44446 - protein, 12 aa, synthetic construct
ASWDNTTGWFKI

SEQ ID NO: 44447 - protein, 11 aa, synthetic construct
ASWDNTGWFKI

SEQ ID NO: 44448 - protein, 13 aa, synthetic construct
ASWDMDTTGWFKI

SEQ ID NO: 44449 - protein, 10 aa, synthetic construct
ASWDLYYKKH

SEQ ID NO: 44450 - protein, 14 aa, synthetic construct
ASWDLVYNTGLFNI

SEQ ID NO: 44451 - protein, 13 aa, synthetic construct
ASWDLVTTGWFKI

SEQ ID NO: 44452 - protein, 13 aa, synthetic construct
ASWDLGTTGWLKI

SEQ ID NO: 44453 - protein, 13 aa, synthetic construct
ASWDLGTTGLFKI

SEQ ID NO: 44454 - protein, 13 aa, synthetic construct
ASWDIGTTGRFKI

SEQ ID NO: 44455 - protein, 12 aa, synthetic construct
ASWDEATGGFNI

SEQ ID NO: 44456 - protein, 11 aa, synthetic construct
ASAGGGYYKKL

SEQ ID NO: 44457 - protein, 12 aa, synthetic construct
ASWANSTGWFKI

SEQ ID NO: 44458 - protein, 12 aa, synthetic construct
ASVDWTTGWFKI

SEQ ID NO: 44459 - protein, 12 aa, synthetic construct
ASREKNKGWLNK

SEQ ID NO: 44460 - protein, 11 aa, synthetic construct
ASLYTTGWFKI

SEQ ID NO: 44461 - protein, 11 aa, synthetic construct
ASLKGTGWFKI

SEQ ID NO: 44462 - protein, 12 aa, synthetic construct
ASLDWTTCWFNI

SEQ ID NO: 44463 - protein, 11 aa, synthetic construct
ASLDNTGWFKK

SEQ ID NO: 44464 - protein, 11 aa, synthetic construct
ASINTTGWFNI

SEQ ID NO: 44465 - protein, 14 aa, synthetic construct
ASGDWVYTTGWLKI

SEQ ID NO: 44466 - protein, 11 aa, synthetic construct
ASFYTNCWFKI

SEQ ID NO: 44467 - protein, 11 aa, synthetic construct
ASFYNTGWFKI

SEQ ID NO: 44468 - protein, 11 aa, synthetic construct
ASFNTTGWFKI

SEQ ID NO: 44469 - protein, 11 aa, synthetic construct
ASEDTTGWLKK

SEQ ID NO: 44470 - protein, 11 aa, synthetic construct
ASAGGGYYNKM

SEQ ID NO: 44471 - protein, 13 aa, synthetic construct
AELDQKTTGWFKI

SEQ ID NO: 44472 - protein, 10 aa, synthetic construct
AAWDWCYKTL

SEQ ID NO: 44473 - protein, 14 aa, synthetic construct
AAWELVYTTGWFKK

SEQ ID NO: 44474 - protein, 12 aa, synthetic construct
AARDRGTGWFKI

SEQ ID NO: 44475 - protein, 11 aa, synthetic construct
AARGATGWFKI

SEQ ID NO: 44476 - protein, 12 aa, synthetic construct
AAREYTTGWFKI

SEQ ID NO: 44477 - protein, 11 aa, synthetic construct
AARETAGWFKI

SEQ ID NO: 44478 - protein, 12 aa, synthetic construct
AAREKTKGWLKI

SEQ ID NO: 44479 - protein, 12 aa, synthetic construct
AAREHTTRWFKI

SEQ ID NO: 44480 - protein, 12 aa, synthetic construct
AAREHTTGWFKI

SEQ ID NO: 44481 - protein, 12 aa, synthetic construct
AARDYTTGWFEI

SEQ ID NO: 44482 - protein, 12 aa, synthetic construct
AARDYTPGWFKI

SEQ ID NO: 44483 - protein, 12 aa, synthetic construct
AARDYGTGWFKI

SEQ ID NO: 44484 - protein, 12 aa, synthetic construct
AARDWTTGWFQI

SEQ ID NO: 44485 - protein, 12 aa, synthetic construct
AARDWTTGWFNI

SEQ ID NO: 44486 - protein, 10 aa, synthetic construct
AARDWCYKKL

SEQ ID NO: 44487 - protein, 11 aa, synthetic construct
AARDSTGWFKI

SEQ ID NO: 44488 - protein, 13 aa, synthetic construct
AARDRDTNGWFKI

SEQ ID NO: 44489 - protein, 11 aa, synthetic construct
AARKCTGMFKI

SEQ ID NO: 44490 - protein, 13 aa, synthetic construct
AARDRDSTGWFKI

SEQ ID NO: 44491 - protein, 13 aa, synthetic construct
AARDQNTTGCFKI

SEQ ID NO: 44492 - protein, 13 aa, synthetic construct
AARDQNTTCWFKI

SEQ ID NO: 44493 - protein, 11 aa, synthetic construct
AARDPTGWLKI

SEQ ID NO: 44494 - protein, 14 aa, synthetic construct
AARDPSHTNGWFKI

SEQ ID NO: 44495 - protein, 11 aa, synthetic construct
AARDPPGWFNI

SEQ ID NO: 44496 - protein, 14 aa, synthetic construct
AARDPAPTPGWFKI

SEQ ID NO: 44497 - protein, 14 aa, synthetic construct
AARDLGYTTGWLKI

SEQ ID NO: 44498 - protein, 13 aa, synthetic construct
AARDLGTTGWYKR

SEQ ID NO: 44499 - protein, 13 aa, synthetic construct
AARDLGTTGLFNI

SEQ ID NO: 44500 - protein, 12 aa, synthetic construct
AARDEATGWLKI

SEQ ID NO: 44501 - protein, 12 aa, synthetic construct
AARDEATGWFQI

SEQ ID NO: 44502 - protein, 12 aa, synthetic construct
AARDEATGWFEI

SEQ ID NO: 44503 - protein, 13 aa, synthetic construct
AARGMDTTGWFKI

SEQ ID NO: 44504 - protein, 7 aa, synthetic construct
AARKGTG

SEQ ID NO: 44505 - protein, 11 aa, synthetic construct
AALYTTGWLKI

SEQ ID NO: 44506 - protein, 11 aa, synthetic construct
AAVDTTGWCEI

SEQ ID NO: 44507 - protein, 11 aa, synthetic construct
AAVYTTGWFKI

SEQ ID NO: 44508 - protein, 11 aa, synthetic construct
AAVYNNGWLKI

SEQ ID NO: 44509 - protein, 11 aa, synthetic construct
AAVYDTRLLKI

SEQ ID NO: 44510 - protein, 14 aa, synthetic construct
AAVVHNHTTGWLKI

SEQ ID NO: 44511 - protein, 11 aa, synthetic construct
AAVVFTGWVMI

SEQ ID NO: 44512 - protein, 11 aa, synthetic construct
AAVVFTGWFKI

SEQ ID NO: 44513 - protein, 11 aa, synthetic construct
AAVSTTGWFKI

SEQ ID NO: 44514 - protein, 11 aa, synthetic construct
AAVGGGYYKKL

SEQ ID NO: 44515 - protein, 11 aa, synthetic construct
AAVETKGWFKI

SEQ ID NO: 44516 - protein, 12 aa, synthetic construct
AAVEHTTGWFKI

SEQ ID NO: 44517 - protein, 12 aa, synthetic construct
AAVEEAQGWFNI

SEQ ID NO: 44518 - protein, 12 aa, synthetic construct
AAVDYTTGGFQI

SEQ ID NO: 44519 - protein, 14 aa, synthetic construct
AAVDWVYTTGWFKI

SEQ ID NO: 44520 - protein, 13 aa, synthetic construct
AAVDRYTTGWFKI

SEQ ID NO: 44521 - protein, 11 aa, synthetic construct
AARKGTGLFKI

SEQ ID NO: 44522 - protein, 12 aa, synthetic construct
AAVDRGTGWLKI

SEQ ID NO: 44523 - protein, 13 aa, synthetic construct
AAVDQNNTGWFEI

SEQ ID NO: 44524 - protein, 14 aa, synthetic construct
AAVDPSHTTGWFKI

SEQ ID NO: 44525 - protein, 9 aa, synthetic construct
AAVDFYKKI

SEQ ID NO: 44526 - protein, 12 aa, synthetic construct
AAVDEATGWFKI

SEQ ID NO: 44527 - protein, 12 aa, synthetic construct
AAVANTNGLFKI

SEQ ID NO: 44528 - protein, 11 aa, synthetic construct
AASDTTGWFKI

SEQ ID NO: 44529 - protein, 10 aa, synthetic construct
AASATGWFKI

SEQ ID NO: 44530 - protein, 11 aa, synthetic construct
AARYTTGWFKI

SEQ ID NO: 44531 - protein, 12 aa, synthetic construct
AARVYTTGWFKI

SEQ ID NO: 44532 - protein, 11 aa, synthetic construct
AARVSTGWFKI

SEQ ID NO: 44533 - protein, 9 aa, synthetic construct
AARPAWVKI

SEQ ID NO: 44534 - protein, 11 aa, synthetic construct
AARKGTGWLKI

SEQ ID NO: 44535 - protein, 11 aa, synthetic construct
AAPYTTGWFKI

SEQ ID NO: 44536 - protein, 11 aa, synthetic construct
AALYTTGWFVR

SEQ ID NO: 44537 - protein, 11 aa, synthetic construct
AAGVSTCWFKI

SEQ ID NO: 44538 - protein, 10 aa, synthetic construct
AALAWNYKKL

SEQ ID NO: 44539 - protein, 13 aa, synthetic construct
AALDRYTTGWVKI

SEQ ID NO: 44540 - protein, 13 aa, synthetic construct
AALDRDTTGRFKI

SEQ ID NO: 44541 - protein, 13 aa, synthetic construct
AALDRDTTGLFNI

SEQ ID NO: 44542 - protein, 13 aa, synthetic construct
AALDRDNTGWFKI

SEQ ID NO: 44543 - protein, 12 aa, synthetic construct
AALDQTNGWFKI

SEQ ID NO: 44544 - protein, 13 aa, synthetic construct
AALDQNTSGWFKI

SEQ ID NO: 44545 - protein, 13 aa, synthetic construct
AALDQNNTGLFRI

SEQ ID NO: 44546 - protein, 13 aa, synthetic construct
AALDLGTTGLLKI

SEQ ID NO: 44547 - protein, 13 aa, synthetic construct
AALDLGTPVWFKR

SEQ ID NO: 44548 - protein, 13 aa, synthetic construct
AALDLGNKGLFKI

SEQ ID NO: 44549 - protein, 14 aa, synthetic construct
AALDHTQKTGLLKK

SEQ ID NO: 44550 - protein, 9 aa, synthetic construct
AALDFFKKL

SEQ ID NO: 44551 - protein, 10 aa, synthetic construct
AALAWYYNKL

SEQ ID NO: 44552 - protein, 9 aa, synthetic construct
AALAVWFKI

SEQ ID NO: 44553 - protein, 11 aa, synthetic construct
AALDTPGWFKI

SEQ ID NO: 44554 - protein, 13 aa, synthetic construct
AALAQNNTGWLKV

SEQ ID NO: 44555 - protein, 12 aa, synthetic construct
AALANTKGWFKI

SEQ ID NO: 44556 - protein, 10 aa, synthetic construct
AALALYNKKH

SEQ ID NO: 44557 - protein, 12 aa, synthetic construct
AALAHTTGWFKI

SEQ ID NO: 44558 - protein, 12 aa, synthetic construct
AALADTTVWFKI

SEQ ID NO: 44559 - protein, 12 aa, synthetic construct
AALADTTGWFKI

SEQ ID NO: 44560 - protein, 11 aa, synthetic construct
AAIYTTGWLKI

SEQ ID NO: 44561 - protein, 11 aa, synthetic construct
AAIYTTGWFKK

SEQ ID NO: 44562 - protein, 7 aa, synthetic construct
AAGWLKI

SEQ ID NO: 44563 - protein, 7 aa, synthetic construct
AAGWFKI

SEQ ID NO: 44564 - protein, 12 aa, synthetic construct
AAGVWSTGWLML

SEQ ID NO: 44565 - protein, 11 aa, synthetic construct
AAGVSTGWVKI

SEQ ID NO: 44566 - protein, 11 aa, synthetic construct
AAGVSTGWFMI

SEQ ID NO: 44567 - protein, 14 aa, synthetic construct
AALDTNHTTGWFKI

SEQ ID NO: 44568 - protein, 11 aa, synthetic construct
AALDTTGCFKK

SEQ ID NO: 44569 - protein, 11 aa, synthetic construct
AALYTTCWLKI

SEQ ID NO: 44570 - protein, 13 aa, synthetic construct
AALGLGTTGLFKI

SEQ ID NO: 44571 - protein, 11 aa, synthetic construct
AALYTPGWFKI

SEQ ID NO: 44572 - protein, 11 aa, synthetic construct
AALVSTGWLKI

SEQ ID NO: 44573 - protein, 11 aa, synthetic construct
AALVSTGWFNI

SEQ ID NO: 44574 - protein, 11 aa, synthetic construct
AALVSNGWFKI

SEQ ID NO: 44575 - protein, 11 aa, synthetic construct
AALVNTGWFKI

SEQ ID NO: 44576 - protein, 11 aa, synthetic construct
AALVFTGLFKI

SEQ ID NO: 44577 - protein, 11 aa, synthetic construct
AALVFNGWVKI

SEQ ID NO: 44578 - protein, 12 aa, synthetic construct
AALTNTTGWFKI

SEQ ID NO: 44579 - protein, 9 aa, synthetic construct
AALPWWFKI

SEQ ID NO: 44580 - protein, 9 aa, synthetic construct
AALPVWFKI

SEQ ID NO: 44581 - protein, 11 aa, synthetic construct
AALNGTGWFKI

SEQ ID NO: 44582 - protein, 11 aa, synthetic construct
AALKGTGLFKI

SEQ ID NO: 44583 - protein, 12 aa, synthetic construct
AALGWTTGWFKI

SEQ ID NO: 44584 - protein, 12 aa, synthetic construct
AALGEPPGWFNI

SEQ ID NO: 44585 - protein, 11 aa, synthetic construct
AALDTTGLFKI

SEQ ID NO: 44586 - protein, 13 aa, synthetic construct
AALEQNNTGWLKI

SEQ ID NO: 44587 - protein, 11 aa, synthetic construct
AALENTGWFKI

SEQ ID NO: 44588 - protein, 12 aa, synthetic construct
AALDYTKGWFKK

SEQ ID NO: 44589 - protein, 12 aa, synthetic construct
AALDYGTGWFKV

SEQ ID NO: 44590 - protein, 12 aa, synthetic construct
AALDYGTGWFKL

SEQ ID NO: 44591 - protein, 14 aa, synthetic construct
AALDYGPSTGWFKI

SEQ ID NO: 44592 - protein, 10 aa, synthetic construct
AALDWYYNKL

SEQ ID NO: 44593 - protein, 10 aa, synthetic construct
AALDWYYKKI

SEQ ID NO: 44594 - protein, 10 aa, synthetic construct
AALDWYYKKH

SEQ ID NO: 44595 - protein, 14 aa, synthetic construct
AALDWVYTTGLFKI

SEQ ID NO: 44596 - protein, 12 aa, synthetic construct
AALDWTTCWFKI

SEQ ID NO: 44597 - protein, 12 aa, synthetic construct
AALDWTKGWFNI

SEQ ID NO: 44598 - protein, 10 aa, synthetic construct
AALDWCYKKL

SEQ ID NO: 44599 - protein, 11 aa, synthetic construct
AAVYTTGWLQI

SEQ ID NO: 44600 - protein, 12 aa, synthetic construct
AAWAAPTGWFKI

SEQ ID NO: 44601 - protein, 9 aa, synthetic construct
AAWACWFKI

SEQ ID NO: 44602 - protein, 11 aa, synthetic construct
AAWATTGWFQI

SEQ ID NO: 44603 - protein, 12 aa, synthetic construct
AAWAYTNGLFKI

SEQ ID NO: 44604 - protein, 12 aa, synthetic construct
AAWAYGTCWLKI

SEQ ID NO: 44605 - protein, 12 aa, synthetic construct
AAWAYGNGWFKI

SEQ ID NO: 44606 - protein, 14 aa, synthetic construct
AAWAWVYTTGWVQI

SEQ ID NO: 44607 - protein, 14 aa, synthetic construct
AAWAWVYTTGWFKK

SEQ ID NO: 44608 - protein, 14 aa, synthetic construct
AAWAWVYTTGRLKK

SEQ ID NO: 44609 - protein, 14 aa, synthetic construct
AAWAWVYTTGGFKI

SEQ ID NO: 44610 - protein, 14 aa, synthetic construct
AAWAWVYSTGWFKI

SEQ ID NO: 44611 - protein, 12 aa, synthetic construct
AAWAWTTGWFRI

SEQ ID NO: 44612 - protein, 10 aa, synthetic construct
AAWAWCYKKL

SEQ ID NO: 44613 - protein, 11 aa, synthetic construct
AAWATTGWVQL

SEQ ID NO: 44614 - protein, 11 aa, synthetic construct
AAWATTGWVKL

SEQ ID NO: 44615 - protein, 11 aa, synthetic construct
AAWATTGWVKI

SEQ ID NO: 44616 - protein, 11 aa, synthetic construct
AAWATTGGLKL

SEQ ID NO: 44617 - protein, 12 aa, synthetic construct
AAWAYTPGWFQI

SEQ ID NO: 44618 - protein, 11 aa, synthetic construct
AAWATTGGFKI

SEQ ID NO: 44619 - protein, 14 aa, synthetic construct
AAWATSHTTGWFKI

SEQ ID NO: 44620 - protein, 10 aa, synthetic construct
AAWASYYKKL

SEQ ID NO: 44621 - protein, 12 aa, synthetic construct
AAWASTTGWFKI

SEQ ID NO: 44622 - protein, 13 aa, synthetic construct
AAWARYTTGWVKI

SEQ ID NO: 44623 - protein, 13 aa, synthetic construct
AAWARYTTGWFKT

SEQ ID NO: 44624 - protein, 13 aa, synthetic construct
AAWARYTTGLFKI

SEQ ID NO: 44625 - protein, 13 aa, synthetic construct
AAWARYTTGGFKI

SEQ ID NO: 44626 - protein, 13 aa, synthetic construct
AAWARYTAGWFKI

SEQ ID NO: 44627 - protein, 12 aa, synthetic construct
AAWARTTGWFKI

SEQ ID NO: 44628 - protein, 12 aa, synthetic construct
AAWARGTGRVQI

SEQ ID NO: 44629 - protein, 12 aa, synthetic construct
AAWARGTDWFKI

SEQ ID NO: 44630 - protein, 13 aa, synthetic construct
AAWARETTGWFKI

SEQ ID NO: 44631 - protein, 12 aa, synthetic construct
AAWAYTPGWFKI

SEQ ID NO: 44632 - protein, 12 aa, synthetic construct
AAWAYTPGWFRI

SEQ ID NO: 44633 - protein, 8 aa, synthetic construct
AAWADKKL

SEQ ID NO: 44634 - protein, 12 aa, synthetic construct
AAWDCTTPWFDI

SEQ ID NO: 44635 - protein, 12 aa, synthetic construct
AAWDEAPGWFKL

SEQ ID NO: 44636 - protein, 12 aa, synthetic construct
AAWDEANGWFKI

SEQ ID NO: 44637 - protein, 12 aa, synthetic construct
AAWDDTTGWFQI

SEQ ID NO: 44638 - protein, 12 aa, synthetic construct
AAWDDPPVGSRL

SEQ ID NO: 44639 - protein, 12 aa, synthetic construct
AAWDDPPGWVKI

SEQ ID NO: 44640 - protein, 12 aa, synthetic construct
AAWDDNTGWFKI

SEQ ID NO: 44641 - protein, 12 aa, synthetic construct
AAWDDGTGWLKI

SEQ ID NO: 44642 - protein, 12 aa, synthetic construct
AAWDDATGWLKI

SEQ ID NO: 44643 - protein, 12 aa, synthetic construct
AAWDDATCWFKI

SEQ ID NO: 44644 - protein, 9 aa, synthetic construct
AAWDCYKKL

SEQ ID NO: 44645 - protein, 9 aa, synthetic construct
AAWDCWFKI

SEQ ID NO: 44646 - protein, 13 aa, synthetic construct
AAWDCVPTGWFKI

SEQ ID NO: 44647 - protein, 11 aa, synthetic construct
AAWDCTWLFKI

SEQ ID NO: 44648 - protein, 12 aa, synthetic construct
AAWDCTTGWLNI

SEQ ID NO: 44649 - protein, 12 aa, synthetic construct
AAWAYTTCWFNI

SEQ ID NO: 44650 - protein, 12 aa, synthetic construct
AAWDCTTGWLKT

SEQ ID NO: 44651 - protein, 12 aa, synthetic construct
AAWDCTTGWLKI

SEQ ID NO: 44652 - protein, 12 aa, synthetic construct
AAWDCTTGWFEI

SEQ ID NO: 44653 - protein, 11 aa, synthetic construct
AAWDCSGWFKT

SEQ ID NO: 44654 - protein, 13 aa, synthetic construct
AAWDCQTTGWLKI

SEQ ID NO: 44655 - protein, 12 aa, synthetic construct
AAWDCNTGWFKI

SEQ ID NO: 44656 - protein, 12 aa, synthetic construct
AAWDCGTGWLKI

SEQ ID NO: 44657 - protein, 12 aa, synthetic construct
AAWDCGTGWFKI

SEQ ID NO: 44658 - protein, 12 aa, synthetic construct
AAWCLGRGWFKL

SEQ ID NO: 44659 - protein, 12 aa, synthetic construct
AAWAYTTGWSKI

SEQ ID NO: 44660 - protein, 12 aa, synthetic construct
AAWAYTTGWLNI

SEQ ID NO: 44661 - protein, 12 aa, synthetic construct
AAWAYTTGWFTI

SEQ ID NO: 44662 - protein, 12 aa, synthetic construct
AAWAYTTGWFQI

SEQ ID NO: 44663 - protein, 13 aa, synthetic construct
AAWARDTTGWIKI

SEQ ID NO: 44664 - protein, 13 aa, synthetic construct
AAWARDTTGWFNI

SEQ ID NO: 44665 - protein, 13 aa, synthetic construct
AAWARDTTGWFMI

SEQ ID NO: 44666 - protein, 12 aa, synthetic construct
AAWAKTTGWFNI

SEQ ID NO: 44667 - protein, 13 aa, synthetic construct
AAWALGTTGWVKI

SEQ ID NO: 44668 - protein, 13 aa, synthetic construct
AAWALGTTGWLKR

SEQ ID NO: 44669 - protein, 13 aa, synthetic construct
AAWALGTTGWFQI

SEQ ID NO: 44670 - protein, 13 aa, synthetic construct
AAWALGTTGWFKR

SEQ ID NO: 44671 - protein, 13 aa, synthetic construct
AAWALGTTGLFMI

SEQ ID NO: 44672 - protein, 13 aa, synthetic construct
AAWALGTTGLFKI

SEQ ID NO: 44673 - protein, 13 aa, synthetic construct
AAWALGTTGGFKI

SEQ ID NO: 44674 - protein, 13 aa, synthetic construct
AAWALGSTGWFMI

SEQ ID NO: 44675 - protein, 13 aa, synthetic construct
AAWALGSTGWFKI

SEQ ID NO: 44676 - protein, 13 aa, synthetic construct
AAWALGSPGWFKI

SEQ ID NO: 44677 - protein, 14 aa, synthetic construct
AAWALGNTTGWFKI

SEQ ID NO: 44678 - protein, 12 aa, synthetic construct
AAWAKTTGWLKI

SEQ ID NO: 44679 - protein, 12 aa, synthetic construct
AAWAKTTGWIKI

SEQ ID NO: 44680 - protein, 12 aa, synthetic construct
AAWAKTTGGFKI

SEQ ID NO: 44681 - protein, 13 aa, synthetic construct
AAWARDTTCWFKV

SEQ ID NO: 44682 - protein, 12 aa, synthetic construct
AAWAHTTGWFEI

SEQ ID NO: 44683 - protein, 12 aa, synthetic construct
AAWAHTNGWFKI

SEQ ID NO: 44684 - protein, 11 aa, synthetic construct
AAWAHTGWFKI

SEQ ID NO: 44685 - protein, 13 aa, synthetic construct
AAWAHNTPGWVKI

SEQ ID NO: 44686 - protein, 9 aa, synthetic construct
AAWAGWFMI

SEQ ID NO: 44687 - protein, 14 aa, synthetic construct
AAWAGVYTTGWFKI

SEQ ID NO: 44688 - protein, 9 aa, synthetic construct
AAWAGLLEI

SEQ ID NO: 44689 - protein, 9 aa, synthetic construct
AAWAGFFKI

SEQ ID NO: 44690 - protein, 13 aa, synthetic construct
AAWAGDTPGWFKI

SEQ ID NO: 44691 - protein, 12 aa, synthetic construct
AAWAEATGWFNI

SEQ ID NO: 44692 - protein, 12 aa, synthetic construct
AAWAEATGGFKL

SEQ ID NO: 44693 - protein, 12 aa, synthetic construct
AAWAEAPGGFKI

SEQ ID NO: 44694 - protein, 12 aa, synthetic construct
AAWADTPGWFKR

SEQ ID NO: 44695 - protein, 13 aa, synthetic construct
AAWALRTTGWFKI

SEQ ID NO: 44696 - protein, 12 aa, synthetic construct
AAWANAPGWFKI

SEQ ID NO: 44697 - protein, 12 aa, synthetic construct
AAWANNNGWFKI

SEQ ID NO: 44698 - protein, 12 aa, synthetic construct
AAWANPTGWFKI

SEQ ID NO: 44699 - protein, 13 aa, synthetic construct
AAWARDTNGWFKI

SEQ ID NO: 44700 - protein, 13 aa, synthetic construct
AAWARDNTGWFKI

SEQ ID NO: 44701 - protein, 13 aa, synthetic construct
AAWARATTGWFKI

SEQ ID NO: 44702 - protein, 12 aa, synthetic construct
AAWAQTTGWFKI

SEQ ID NO: 44703 - protein, 8 aa, synthetic construct
AAWAQSGW

SEQ ID NO: 44704 - protein, 11 aa, synthetic construct
AAWAPTGWLKK

SEQ ID NO: 44705 - protein, 14 aa, synthetic construct
AAWAPSHTTGWLKI

SEQ ID NO: 44706 - protein, 14 aa, synthetic construct
AAWAPSHTTGGFKI

SEQ ID NO: 44707 - protein, 12 aa, synthetic construct
AAWANTTSWFKI

SEQ ID NO: 44708 - protein, 12 aa, synthetic construct
AAWANTTGWVQI

SEQ ID NO: 44709 - protein, 12 aa, synthetic construct
AAWANTTGWVKI

SEQ ID NO: 44710 - protein, 12 aa, synthetic construct
AAWANTTGWLQI

SEQ ID NO: 44711 - protein, 12 aa, synthetic construct
AAWANTTGWFTI

SEQ ID NO: 44712 - protein, 12 aa, synthetic construct
AAWANTTGWFQI

SEQ ID NO: 44713 - protein, 12 aa, synthetic construct
AAWANTTGWFNI

SEQ ID NO: 44714 - protein, 12 aa, synthetic construct
AAWANTTGWFMI

SEQ ID NO: 44715 - protein, 12 aa, synthetic construct
AAWANTTGWFKM

SEQ ID NO: 44716 - protein, 12 aa, synthetic construct
AAWANTTGWFKK

SEQ ID NO: 44717 - protein, 12 aa, synthetic construct
AAWANTTGRFKI

SEQ ID NO: 44718 - protein, 12 aa, synthetic construct
AAWANTTGLLKI

SEQ ID NO: 44719 - protein, 12 aa, synthetic construct
AAWANTTGLFEI

SEQ ID NO: 44720 - protein, 12 aa, synthetic construct
AAWANTTGGFRI

SEQ ID NO: 44721 - protein, 12 aa, synthetic construct
AAWANTTGCFTI

SEQ ID NO: 44722 - protein, 8 aa, synthetic construct
AAWANTTG

SEQ ID NO: 44723 - protein, 12 aa, synthetic construct
AAWANTTCWLKI

SEQ ID NO: 44724 - protein, 12 aa, synthetic construct
AAWANTTCWFKI

SEQ ID NO: 44725 - protein, 12 aa, synthetic construct
AAWANTPGWFKI

SEQ ID NO: 44726 - protein, 11 aa, synthetic construct
AAGVSTGLFKI

SEQ ID NO: 44727 - protein, 13 aa, synthetic construct
AAGVRDTTGWFKI

SEQ ID NO: 44728 - protein, 13 aa, synthetic construct
AAWELGTTGLFKI

SEQ ID NO: 44729 - protein, 11 aa, synthetic construct
AACVSPCWFQI

SEQ ID NO: 44730 - protein, 11 aa, synthetic construct
AAFETPGWFKI

SEQ ID NO: 44731 - protein, 12 aa, synthetic construct
AAFDYTTGWFNI

SEQ ID NO: 44732 - protein, 11 aa, synthetic construct
AAFDTTRWFKI

SEQ ID NO: 44733 - protein, 11 aa, synthetic construct
AAFDTTGWVKI

SEQ ID NO: 44734 - protein, 11 aa, synthetic construct
AAFDTTGWLKI

SEQ ID NO: 44735 - protein, 11 aa, synthetic construct
AAFDTTGWCKI

SEQ ID NO: 44736 - protein, 11 aa, synthetic construct
AAFDTPGWCKI

SEQ ID NO: 44737 - protein, 11 aa, synthetic construct
AAFCTTGWFKM

SEQ ID NO: 44738 - protein, 11 aa, synthetic construct
AAFCTTGWCKI

SEQ ID NO: 44739 - protein, 11 aa, synthetic construct
AAEKGPGWLKI

SEQ ID NO: 44740 - protein, 11 aa, synthetic construct
AAEGGGYYNKL

SEQ ID NO: 44741 - protein, 12 aa, synthetic construct
AACYYTTGWLKI

SEQ ID NO: 44742 - protein, 7 aa, synthetic construct
AACWFKI

SEQ ID NO: 44743 - protein, 11 aa, synthetic construct
AACVNNGGFEI

SEQ ID NO: 44744 - protein, 14 aa, synthetic construct
AAFEWVYTTGWFKI

SEQ ID NO: 44745 - protein, 11 aa, synthetic construct
AACVLTGWFKI

SEQ ID NO: 44746 - protein, 11 aa, synthetic construct
AACVFTSWFKI

SEQ ID NO: 44747 - protein, 9 aa, synthetic construct
AACTGWFKI

SEQ ID NO: 44748 - protein, 11 aa, synthetic construct
AACNGTGLFKI

SEQ ID NO: 44749 - protein, 11 aa, synthetic construct
AACKGNGWFKI

SEQ ID NO: 44750 - protein, 11 aa, synthetic construct
AACFATGWFKI

SEQ ID NO: 44751 - protein, 12 aa, synthetic construct
AACEWTTGWLKI

SEQ ID NO: 44752 - protein, 12 aa, synthetic construct
AACERGTGWFKI

SEQ ID NO: 44753 - protein, 11 aa, synthetic construct
AACENTGWFNI

SEQ ID NO: 44754 - protein, 12 aa, synthetic construct
AACEHTTGWFKI

SEQ ID NO: 44755 - protein, 14 aa, synthetic construct
AACDYRGATGWFKI

SEQ ID NO: 44756 - protein, 12 aa, synthetic construct
AACDYPTGWFKI

SEQ ID NO: 44757 - protein, 12 aa, synthetic construct
AACDYETGWLQI

SEQ ID NO: 44758 - protein, 11 aa, synthetic construct
AAFETTGWFKI

SEQ ID NO: 44759 - protein, 11 aa, synthetic construct
AAFNNTGWLKI

SEQ ID NO: 44760 - protein, 14 aa, synthetic construct
AACDWVYTTGWFKI

SEQ ID NO: 44761 - protein, 11 aa, synthetic construct
AAFYTTGWFQI

SEQ ID NO: 44762 - protein, 12 aa, synthetic construct
AAGANTTGGFKI

SEQ ID NO: 44763 - protein, 11 aa, synthetic construct
AAGANTGWFKI

SEQ ID NO: 44764 - protein, 14 aa, synthetic construct
AAGALVYTTGWFKI

SEQ ID NO: 44765 - protein, 13 aa, synthetic construct
AAGALGTTGWVKI

SEQ ID NO: 44766 - protein, 12 aa, synthetic construct
AAGAHTTGWFKI

SEQ ID NO: 44767 - protein, 12 aa, synthetic construct
AAGAHTPGWVQI

SEQ ID NO: 44768 - protein, 12 aa, synthetic construct
AAGAGTTGWVKI

SEQ ID NO: 44769 - protein, 14 aa, synthetic construct
AAGAGGYTTGWFKI

SEQ ID NO: 44770 - protein, 12 aa, synthetic construct
AAGAFGAGWLEL

SEQ ID NO: 44771 - protein, 12 aa, synthetic construct
AAGAEATGWFKI

SEQ ID NO: 44772 - protein, 12 aa, synthetic construct
AAGAEAPGWFKI

SEQ ID NO: 44773 - protein, 12 aa, synthetic construct
AAGADTTGGFKI

SEQ ID NO: 44774 - protein, 11 aa, synthetic construct
AAFYTTSWFKI

SEQ ID NO: 44775 - protein, 11 aa, synthetic construct
AAFYTTGWFAI

SEQ ID NO: 44776 - protein, 11 aa, synthetic construct
AAFNTPGWFKI

SEQ ID NO: 44777 - protein, 11 aa, synthetic construct
AAFYTTGRLKI

SEQ ID NO: 44778 - protein, 11 aa, synthetic construct
AAFYTTGLFNI

SEQ ID NO: 44779 - protein, 11 aa, synthetic construct
AAFYTTGGFKI

SEQ ID NO: 44780 - protein, 11 aa, synthetic construct
AAFYTTDWFKI

SEQ ID NO: 44781 - protein, 11 aa, synthetic construct
AAFYTNGWFKI

SEQ ID NO: 44782 - protein, 11 aa, synthetic construct
AAFYTHCWLKI

SEQ ID NO: 44783 - protein, 11 aa, synthetic construct
AAFYSTGWFKI

SEQ ID NO: 44784 - protein, 11 aa, synthetic construct
AAFYPPGWGKI

SEQ ID NO: 44785 - protein, 11 aa, synthetic construct
AAFYNTGFFKI

SEQ ID NO: 44786 - protein, 11 aa, synthetic construct
AAFYNTCWFKI

SEQ ID NO: 44787 - protein, 11 aa, synthetic construct
AAFYITGWFKI

SEQ ID NO: 44788 - protein, 11 aa, synthetic construct
AAFSTTGWFKI

SEQ ID NO: 44789 - protein, 9 aa, synthetic construct
AAFQGWLNI

SEQ ID NO: 44790 - protein, 12 aa, synthetic construct
AACDYATGWFKI

SEQ ID NO: 44791 - protein, 10 aa, synthetic construct
AACDWDYKKL

SEQ ID NO: 44792 - protein, 11 aa, synthetic construct
AAGVLTGWFKI

SEQ ID NO: 44793 - protein, 11 aa, synthetic construct
AAAGGGSYKKN

SEQ ID NO: 44794 - protein, 11 aa, synthetic construct
AAAGGGYYMKL

SEQ ID NO: 44795 - protein, 11 aa, synthetic construct
AAAGGGYYMKI

SEQ ID NO: 44796 - protein, 11 aa, synthetic construct
AAAGGGYYKRH

SEQ ID NO: 44797 - protein, 11 aa, synthetic construct
AAAGGGYYKEL

SEQ ID NO: 44798 - protein, 11 aa, synthetic construct
AAAGGGYYEKL

SEQ ID NO: 44799 - protein, 8 aa, synthetic construct
AAAGGGYY

SEQ ID NO: 44800 - protein, 11 aa, synthetic construct
AAAGGGYHKKL

SEQ ID NO: 44801 - protein, 11 aa, synthetic construct
AAAGGGYHKKH

SEQ ID NO: 44802 - protein, 11 aa, synthetic construct
AAAGGGYDKKR

SEQ ID NO: 44803 - protein, 11 aa, synthetic construct
AAAGGGYCKKL

SEQ ID NO: 44804 - protein, 11 aa, synthetic construct
AAAGGGYCKKI

SEQ ID NO: 44805 - protein, 10 aa, synthetic construct
AAAGGGWFKI

SEQ ID NO: 44806 - protein, 11 aa, synthetic construct
AAAGGGSYNKL

SEQ ID NO: 44807 - protein, 11 aa, synthetic construct
AAAGGGSYKKL

SEQ ID NO: 44808 - protein, 11 aa, synthetic construct
AAAGGGYYNKQ

SEQ ID NO: 44809 - protein, 11 aa, synthetic construct
AAAGGGSSKKL

SEQ ID NO: 44810 - protein, 11 aa, synthetic construct
AAAGGGFYKKQ

SEQ ID NO: 44811 - protein, 11 aa, synthetic construct
AAAGGGFYKKH

SEQ ID NO: 44812 - protein, 10 aa, synthetic construct
AAAGGGFYKK

SEQ ID NO: 44813 - protein, 11 aa, synthetic construct
AAAGGGFYKEI

SEQ ID NO: 44814 - protein, 9 aa, synthetic construct
AAAGGGFKI

SEQ ID NO: 44815 - protein, 11 aa, synthetic construct
AAAGGGFFNKK

SEQ ID NO: 44816 - protein, 11 aa, synthetic construct
AAAGGGFFKKK

SEQ ID NO: 44817 - protein, 11 aa, synthetic construct
AAAGGGDYKKH

SEQ ID NO: 44818 - protein, 11 aa, synthetic construct
AAAGGGCYKKR

SEQ ID NO: 44819 - protein, 11 aa, synthetic construct
AAAGGGAYKKL

SEQ ID NO: 44820 - protein, 11 aa, synthetic construct
AAAGGCYYKKL

SEQ ID NO: 44821 - protein, 11 aa, synthetic construct
AAAGEGYYKKL

SEQ ID NO: 44822 - protein, 11 aa, synthetic construct
AAAGGGYYNKK

SEQ ID NO: 44823 - protein, 11 aa, synthetic construct
AAAGGGYYRKL

SEQ ID NO: 44824 - protein, 11 aa, synthetic construct
AACDTTGWFKT

SEQ ID NO: 44825 - protein, 9 aa, synthetic construct
AACDFYKKL

SEQ ID NO: 44826 - protein, 11 aa, synthetic construct
AACDTSGWFKI

SEQ ID NO: 44827 - protein, 12 aa, synthetic construct
AACDRGTGWLKI

SEQ ID NO: 44828 - protein, 12 aa, synthetic construct
AACDRGTGWFQI

SEQ ID NO: 44829 - protein, 12 aa, synthetic construct
AACDRGTGWFKI

SEQ ID NO: 44830 - protein, 13 aa, synthetic construct
AACDRDTNGWFKI

SEQ ID NO: 44831 - protein, 13 aa, synthetic construct
AACDQNNTGWFKI

SEQ ID NO: 44832 - protein, 13 aa, synthetic construct
AACDQNNTGWFEI

SEQ ID NO: 44833 - protein, 13 aa, synthetic construct
AACDPNTTGWCKI

SEQ ID NO: 44834 - protein, 13 aa, synthetic construct
AACDLWTTGWFKI

SEQ ID NO: 44835 - protein, 14 aa, synthetic construct
AACDLVYNTGWFKI

SEQ ID NO: 44836 - protein, 13 aa, synthetic construct
AACDLVTTGWFKI

SEQ ID NO: 44837 - protein, 10 aa, synthetic construct
AACDLDYNKQ

SEQ ID NO: 44838 - protein, 13 aa, synthetic construct
AACDGDTTGWLKI

SEQ ID NO: 44839 - protein, 12 aa, synthetic construct
AACDEATGGFKI

SEQ ID NO: 44840 - protein, 10 aa, synthetic construct
AAAGGYYKKL

SEQ ID NO: 44841 - protein, 12 aa, synthetic construct
AACANTTGWFKI

SEQ ID NO: 44842 - protein, 12 aa, synthetic construct
AACANSTGWFKL

SEQ ID NO: 44843 - protein, 11 aa, synthetic construct
AAAWGGYYKKL

SEQ ID NO: 44844 - protein, 13 aa, synthetic construct
AAAWDYTTGWFKI

SEQ ID NO: 44845 - protein, 11 aa, synthetic construct
AAAWDWCYKKL

SEQ ID NO: 44846 - protein, 14 aa, synthetic construct
AAAWDQNTTGWFKI

SEQ ID NO: 44847 - protein, 11 aa, synthetic construct
AAAVGGYYNKL

SEQ ID NO: 44848 - protein, 11 aa, synthetic construct
AAARGGYYKKL

SEQ ID NO: 44849 - protein, 11 aa, synthetic construct
AAAGWGYFKKL

SEQ ID NO: 44850 - protein, 11 aa, synthetic construct
AAAGVGYYKRL

SEQ ID NO: 44851 - protein, 11 aa, synthetic construct
AAAGTTGWFKI

SEQ ID NO: 44852 - protein, 12 aa, synthetic construct
AAAGSSTGWFKI

SEQ ID NO: 44853 - protein, 13 aa, synthetic construct
AAAGLDTTGWFKI

SEQ ID NO: 44854 - protein, 14 aa, synthetic construct
AAGAPAPTPGGFKI

SEQ ID NO: 44855 - protein, 14 aa, synthetic construct
AAGAPSHTPGWLKI

SEQ ID NO: 44856 - protein, 14 aa, synthetic construct
AAGAPSHTTGWFKI

SEQ ID NO: 44857 - protein, 12 aa, synthetic construct
AAGEHTKGWLKI

SEQ ID NO: 44858 - protein, 12 aa, synthetic construct
AAGEYHTGWFKI

SEQ ID NO: 44859 - protein, 14 aa, synthetic construct
AAGEWVYTTGWVKI

SEQ ID NO: 44860 - protein, 14 aa, synthetic construct
AAGEWVYPPGWFKI

SEQ ID NO: 44861 - protein, 12 aa, synthetic construct
AAGEWTTGWFKI

SEQ ID NO: 44862 - protein, 11 aa, synthetic construct
AAGETTGWFKR

SEQ ID NO: 44863 - protein, 12 aa, synthetic construct
AAGEQTTGWFKI

SEQ ID NO: 44864 - protein, 12 aa, synthetic construct
AAGEPTTGWVPI

SEQ ID NO: 44865 - protein, 11 aa, synthetic construct
AAGEPTGWFQI

SEQ ID NO: 44866 - protein, 13 aa, synthetic construct
AAGELGTTGWVKK

SEQ ID NO: 44867 - protein, 12 aa, synthetic construct
AAGEHTTGWLNI

SEQ ID NO: 44868 - protein, 12 aa, synthetic construct
AAGEHTTGWFNI

SEQ ID NO: 44869 - protein, 12 aa, synthetic construct
AAGEHTTGWFEI

SEQ ID NO: 44870 - protein, 12 aa, synthetic construct
AAGEHTNCWLKI

SEQ ID NO: 44871 - protein, 9 aa, synthetic construct
AAGDYYKKL

SEQ ID NO: 44872 - protein, 12 aa, synthetic construct
AAGEYTTRWFNI

SEQ ID NO: 44873 - protein, 12 aa, synthetic construct
AAGDYWTGWLKI

SEQ ID NO: 44874 - protein, 12 aa, synthetic construct
AAGDYTTGWFNI

SEQ ID NO: 44875 - protein, 12 aa, synthetic construct
AAGDYTPGWFKI

SEQ ID NO: 44876 - protein, 12 aa, synthetic construct
AAGDYTPGGFKI

SEQ ID NO: 44877 - protein, 12 aa, synthetic construct
AAGDYNTGWFKI

SEQ ID NO: 44878 - protein, 12 aa, synthetic construct
AAGDYGTGWYKI

SEQ ID NO: 44879 - protein, 12 aa, synthetic construct
AAGDYGTGGFKI

SEQ ID NO: 44880 - protein, 12 aa, synthetic construct
AAGDYGSGWFKI

SEQ ID NO: 44881 - protein, 12 aa, synthetic construct
AAGDYGPGWFEI

SEQ ID NO: 44882 - protein, 12 aa, synthetic construct
AAGDYGKGWLKI

SEQ ID NO: 44883 - protein, 13 aa, synthetic construct
AAGDYEVTGWFKI

SEQ ID NO: 44884 - protein, 14 aa, synthetic construct
AAGDWVYTTGWLKI

SEQ ID NO: 44885 - protein, 14 aa, synthetic construct
AAGDWVYTTGWFKL

SEQ ID NO: 44886 - protein, 12 aa, synthetic construct
AAGEYTTGWVKI

SEQ ID NO: 44887 - protein, 12 aa, synthetic construct
AAGGEATGWLKI

SEQ ID NO: 44888 - protein, 11 aa, synthetic construct
AAGAPTGWFKI

SEQ ID NO: 44889 - protein, 11 aa, synthetic construct
AAGKGPGWVTR

SEQ ID NO: 44890 - protein, 11 aa, synthetic construct
AAGVLTGLLNI

SEQ ID NO: 44891 - protein, 11 aa, synthetic construct
AAGVITGWFKK

SEQ ID NO: 44892 - protein, 11 aa, synthetic construct
AAGVFTSWFKI

SEQ ID NO: 44893 - protein, 11 aa, synthetic construct
AAGVFTGWVTI

SEQ ID NO: 44894 - protein, 11 aa, synthetic construct
AAGVFTGGFKI

SEQ ID NO: 44895 - protein, 11 aa, synthetic construct
AAGTGTGWFKI

SEQ ID NO: 44896 - protein, 11 aa, synthetic construct
AAGTGTGWFAI

SEQ ID NO: 44897 - protein, 11 aa, synthetic construct
AAGTGTGWCKI

SEQ ID NO: 44898 - protein, 11 aa, synthetic construct
AAGTGPGWCKI

SEQ ID NO: 44899 - protein, 9 aa, synthetic construct
AAGPGWFKL

SEQ ID NO: 44900 - protein, 9 aa, synthetic construct
AAGPGWCKI

SEQ ID NO: 44901 - protein, 9 aa, synthetic construct
AAGPGLFKI

SEQ ID NO: 44902 - protein, 11 aa, synthetic construct
AAGKGTGLFKI

SEQ ID NO: 44903 - protein, 12 aa, synthetic construct
AAGIKGTGWFKI

SEQ ID NO: 44904 - protein, 11 aa, synthetic construct
AAGGETGGFKV

SEQ ID NO: 44905 - protein, 12 aa, synthetic construct
AAGGYTTGWFKI

SEQ ID NO: 44906 - protein, 7 aa, synthetic construct
AAGGYTT

SEQ ID NO: 44907 - protein, 14 aa, synthetic construct
AAGGWVYTTGWFKI

SEQ ID NO: 44908 - protein, 12 aa, synthetic construct
AAGGWTTGWFKI

SEQ ID NO: 44909 - protein, 11 aa, synthetic construct
AAGGVTGWFKI

SEQ ID NO: 44910 - protein, 11 aa, synthetic construct
AAGGTTGWVKI

SEQ ID NO: 44911 - protein, 11 aa, synthetic construct
AAGGTPGWCKI

SEQ ID NO: 44912 - protein, 13 aa, synthetic construct
AAGGQNSCGWVEI

SEQ ID NO: 44913 - protein, 11 aa, synthetic construct
AAGGPTGWVMI

SEQ ID NO: 44914 - protein, 11 aa, synthetic construct
AAGGNTGWVKI

SEQ ID NO: 44915 - protein, 13 aa, synthetic construct
AAGGLGTPGWFKI

SEQ ID NO: 44916 - protein, 17 aa, synthetic construct
AAGGKPMVVKDNLIKGK

SEQ ID NO: 44917 - protein, 10 aa, synthetic construct
AAGGGYYKKN

SEQ ID NO: 44918 - protein, 14 aa, synthetic construct
AAGDWVYTPGWFKI

SEQ ID NO: 44919 - protein, 14 aa, synthetic construct
AAGDWVSTTGWFKI

SEQ ID NO: 44920 - protein, 14 aa, synthetic construct
AAGDWVNNTGWFNI

SEQ ID NO: 44921 - protein, 12 aa, synthetic construct
AAGAYPTGWFQI

SEQ ID NO: 44922 - protein, 13 aa, synthetic construct
AAGDLGTPGGFKI

SEQ ID NO: 44923 - protein, 13 aa, synthetic construct
AAGDLGTKGWFKI

SEQ ID NO: 44924 - protein, 12 aa, synthetic construct
AAGDHTTGWVQI

SEQ ID NO: 44925 - protein, 12 aa, synthetic construct
AAGDHTTGWFGI

SEQ ID NO: 44926 - protein, 9 aa, synthetic construct
AAGDFYKKI

SEQ ID NO: 44927 - protein, 9 aa, synthetic construct
AAGDFYKKH

SEQ ID NO: 44928 - protein, 13 aa, synthetic construct
AAGDFGTTGWFKI

SEQ ID NO: 44929 - protein, 12 aa, synthetic construct
AAGDFATGWFKI

SEQ ID NO: 44930 - protein, 12 aa, synthetic construct
AAGDEATGWVKI

SEQ ID NO: 44931 - protein, 12 aa, synthetic construct
AAGDEATGWFHI

SEQ ID NO: 44932 - protein, 12 aa, synthetic construct
AAGDDTTGWFKI

SEQ ID NO: 44933 - protein, 12 aa, synthetic construct
AAGAYTTGWVKI

SEQ ID NO: 44934 - protein, 12 aa, synthetic construct
AAGAYTTGWFKT

SEQ ID NO: 44935 - protein, 14 aa, synthetic construct
AAGAWVYTTGWFTI

SEQ ID NO: 44936 - protein, 12 aa, synthetic construct
AAGDWTTGWLKI

SEQ ID NO: 44937 - protein, 14 aa, synthetic construct
AAGAWVYTAGWFKI

SEQ ID NO: 44938 - protein, 12 aa, synthetic construct
AAGAWTTGWYKI

SEQ ID NO: 44939 - protein, 12 aa, synthetic construct
AAGAWPTGGVQV

SEQ ID NO: 44940 - protein, 14 aa, synthetic construct
AAGAWGYTPGGVKI

SEQ ID NO: 44941 - protein, 11 aa, synthetic construct
AAGASNYYKKL

SEQ ID NO: 44942 - protein, 13 aa, synthetic construct
AAGARYTTGWFKI

SEQ ID NO: 44943 - protein, 13 aa, synthetic construct
AAGARYTPGWVKI

SEQ ID NO: 44944 - protein, 12 aa, synthetic construct
AAGARGPGWVKI

SEQ ID NO: 44945 - protein, 13 aa, synthetic construct
AAGARDTTGWFKM

SEQ ID NO: 44946 - protein, 13 aa, synthetic construct
AAGARDTTGWFKI

SEQ ID NO: 44947 - protein, 13 aa, synthetic construct
AAGAQNTTGWVKI

SEQ ID NO: 44948 - protein, 13 aa, synthetic construct
AAGAQNTTGWFKI

SEQ ID NO: 44949 - protein, 11 aa, synthetic construct
AAGAPTGWFKV

SEQ ID NO: 44950 - protein, 13 aa, synthetic construct
AAGDLGTPGWFKI

SEQ ID NO: 44951 - protein, 9 aa, synthetic construct
AAGDLGTTG

SEQ ID NO: 44952 - protein, 13 aa, synthetic construct
AAGDLGTTGLFKI

SEQ ID NO: 44953 - protein, 13 aa, synthetic construct
AAGDLGTTGLLKI

SEQ ID NO: 44954 - protein, 12 aa, synthetic construct
AAGDWTTGWFEI

SEQ ID NO: 44955 - protein, 12 aa, synthetic construct
AAGDWTTGGFKI

SEQ ID NO: 44956 - protein, 12 aa, synthetic construct
AAGDWTPGWFKI

SEQ ID NO: 44957 - protein, 14 aa, synthetic construct
AAGDWGYTTGWVKI

SEQ ID NO: 44958 - protein, 14 aa, synthetic construct
AAGDWGYTPGWFKI

SEQ ID NO: 44959 - protein, 14 aa, synthetic construct
AAGDWGYTHGWFKI

SEQ ID NO: 44960 - protein, 10 aa, synthetic construct
AAGDWCCKKL

SEQ ID NO: 44961 - protein, 13 aa, synthetic construct
AAGDVVTTGVLKI

SEQ ID NO: 44962 - protein, 13 aa, synthetic construct
AAGDVGTTGWFKI

SEQ ID NO: 44963 - protein, 11 aa, synthetic construct
AAGDTTGWFNI

SEQ ID NO: 44964 - protein, 11 aa, synthetic construct
AAGDTRGWCKI

SEQ ID NO: 44965 - protein, 11 aa, synthetic construct
AAGDTPGWFMI

SEQ ID NO: 44966 - protein, 13 aa, synthetic construct
AAGDRYTTGWVKI

SEQ ID NO: 44967 - protein, 13 aa, synthetic construct
AAGDRDTPGWFKI

SEQ ID NO: 44968 - protein, 13 aa, synthetic construct
AAGDQNTTGWFKI

SEQ ID NO: 44969 - protein, 11 aa, synthetic construct
AAGDPTGWVKI

SEQ ID NO: 44970 - protein, 11 aa, synthetic construct
AAGDPTGWFKK

SEQ ID NO: 44971 - protein, 11 aa, synthetic construct
AAGDPTGGCTR

SEQ ID NO: 44972 - protein, 14 aa, synthetic construct
AAGDPSHTTGWFKR

SEQ ID NO: 44973 - protein, 14 aa, synthetic construct
AAGDPSHTPGWVKI

SEQ ID NO: 44974 - protein, 11 aa, synthetic construct
AAGDPPGWVEV

SEQ ID NO: 44975 - protein, 12 aa, synthetic construct
AAGDNTTGWFNI

SEQ ID NO: 44976 - protein, 14 aa, synthetic construct
AAGDLVYTTGWFKI

SEQ ID NO: 44977 - protein, 14 aa, synthetic construct
AAGDLVNTTGWFNI

SEQ ID NO: 44978 - protein, 14 aa, synthetic construct
AAGDLVDNTGWLKK

SEQ ID NO: 44979 - protein, 13 aa, synthetic construct
AAGDLGTTGWVKI

SEQ ID NO: 44980 - protein, 13 aa, synthetic construct
AAGDLGTTGWLKI

SEQ ID NO: 44981 - protein, 12 aa, synthetic construct
AAWDEAPGWLKI

SEQ ID NO: 44982 - protein, 12 aa, synthetic construct
AAWDEASGWFKI

SEQ ID NO: 44983 - protein, 12 aa, synthetic construct
AAWDEATGWFKL

SEQ ID NO: 44984 - protein, 10 aa, synthetic construct
AAWDWFYKKL

SEQ ID NO: 44985 - protein, 12 aa, synthetic construct
AAWDWTPGWLKI

SEQ ID NO: 44986 - protein, 12 aa, synthetic construct
AAWDWTNGWFKI

SEQ ID NO: 44987 - protein, 12 aa, synthetic construct
AAWDWTKGWFKI

SEQ ID NO: 44988 - protein, 10 aa, synthetic construct
AAWDWSTGWF

SEQ ID NO: 44989 - protein, 12 aa, synthetic construct
AAWDWSPGWFKI

SEQ ID NO: 44990 - protein, 11 aa, synthetic construct
AAWDWSGWFKI

SEQ ID NO: 44991 - protein, 13 aa, synthetic construct
AAWDWRATGWFKI

SEQ ID NO: 44992 - protein, 12 aa, synthetic construct
AAWDWPTGWVKI

SEQ ID NO: 44993 - protein, 12 aa, synthetic construct
AAWDWPTGWLKI

SEQ ID NO: 44994 - protein, 12 aa, synthetic construct
AAWDWPTGWFKI

SEQ ID NO: 44995 - protein, 12 aa, synthetic construct
AAWDWNTGWLKI

SEQ ID NO: 44996 - protein, 12 aa, synthetic construct
AAWDWNTGCFNI

SEQ ID NO: 44997 - protein, 10 aa, synthetic construct
AAWDWKTGWI

SEQ ID NO: 44998 - protein, 10 aa, synthetic construct
AAWDWEYKKH

SEQ ID NO: 44999 - protein, 8 aa, synthetic construct
AAWDWTTG

SEQ ID NO: 45000 - protein, 10 aa, synthetic construct
AAWDWDYNKL

SEQ ID NO: 45001 - protein, 10 aa, synthetic construct
AAWDWCYRKL

SEQ ID NO: 45002 - protein, 10 aa, synthetic construct
AAWDWCYNKL

SEQ ID NO: 45003 - protein, 13 aa, synthetic construct
AAAGDEATGWFKI

SEQ ID NO: 45004 - protein, 10 aa, synthetic construct
AAWDWCYKEL

SEQ ID NO: 45005 - protein, 10 aa, synthetic construct
AAWDWCDKKI

SEQ ID NO: 45006 - protein, 13 aa, synthetic construct
AAWDVGTTGWVKI

SEQ ID NO: 45007 - protein, 13 aa, synthetic construct
AAWDVGTTGWFNI

SEQ ID NO: 45008 - protein, 12 aa, synthetic construct
AAWDVATGWFNI

SEQ ID NO: 45009 - protein, 12 aa, synthetic construct
AAWDVATGLFKI

SEQ ID NO: 45010 - protein, 12 aa, synthetic construct
AAWDVAPGWFKI

SEQ ID NO: 45011 - protein, 11 aa, synthetic construct
AAWDTTRWFKK

SEQ ID NO: 45012 - protein, 11 aa, synthetic construct
AAWDTTGWYKI

SEQ ID NO: 45013 - protein, 12 aa, synthetic construct
AAWDWTTCWFKI

SEQ ID NO: 45014 - protein, 12 aa, synthetic construct
AAWDWTTGLFNI

SEQ ID NO: 45015 - protein, 11 aa, synthetic construct
AAWDTTGWIKK

SEQ ID NO: 45016 - protein, 14 aa, synthetic construct
AAWDWVYTSGWLNI

SEQ ID NO: 45017 - protein, 10 aa, synthetic construct
AAWDWWYKKL

SEQ ID NO: 45018 - protein, 14 aa, synthetic construct
AAWDWVYTTVWFKK

SEQ ID NO: 45019 - protein, 14 aa, synthetic construct
AAWDWVYTTVWFKI

SEQ ID NO: 45020 - protein, 14 aa, synthetic construct
AAWDWVYTTGWYKI

SEQ ID NO: 45021 - protein, 13 aa, synthetic construct
AAWDWVYTTGWSR

SEQ ID NO: 45022 - protein, 14 aa, synthetic construct
AAWDWVYTTGWLNI

SEQ ID NO: 45023 - protein, 14 aa, synthetic construct
AAWDWVYTTGWFTI

SEQ ID NO: 45024 - protein, 14 aa, synthetic construct
AAWDWVYTTGWFMI

SEQ ID NO: 45025 - protein, 14 aa, synthetic construct
AAWDWVYTTGLFKI

SEQ ID NO: 45026 - protein, 14 aa, synthetic construct
AAWDWVYTTGGFKI

SEQ ID NO: 45027 - protein, 14 aa, synthetic construct
AAWDWVYTTGCFNI

SEQ ID NO: 45028 - protein, 14 aa, synthetic construct
AAWDWVYTTGCFKK

SEQ ID NO: 45029 - protein, 14 aa, synthetic construct
AAWDWVYTTCWFKI

SEQ ID NO: 45030 - protein, 14 aa, synthetic construct
AAWDWVYTNGWLRI

SEQ ID NO: 45031 - protein, 12 aa, synthetic construct
AAWDWTTGRFNI

SEQ ID NO: 45032 - protein, 14 aa, synthetic construct
AAWDWVYTKCWFKI

SEQ ID NO: 45033 - protein, 14 aa, synthetic construct
AAWDWVYNTGWFNI

SEQ ID NO: 45034 - protein, 14 aa, synthetic construct
AAWDWVYNTGCFKI

SEQ ID NO: 45035 - protein, 14 aa, synthetic construct
AAWDWVYITGWFKI

SEQ ID NO: 45036 - protein, 14 aa, synthetic construct
AAWDWVNTTGWFKI

SEQ ID NO: 45037 - protein, 14 aa, synthetic construct
AAWDWVFTTGWLNI

SEQ ID NO: 45038 - protein, 12 aa, synthetic construct
AAWDWTTGWYKI

SEQ ID NO: 45039 - protein, 12 aa, synthetic construct
AAWDWTTGWVKR

SEQ ID NO: 45040 - protein, 12 aa, synthetic construct
AAWDWTTGWFTI

SEQ ID NO: 45041 - protein, 12 aa, synthetic construct
AAWDWTTGWFKR

SEQ ID NO: 45042 - protein, 12 aa, synthetic construct
AAWDWTTGWCKI

SEQ ID NO: 45043 - protein, 9 aa, synthetic construct
AAWDWTTGW

SEQ ID NO: 45044 - protein, 12 aa, synthetic construct
AAWDWTTGSFKI

SEQ ID NO: 45045 - protein, 11 aa, synthetic construct
AAWDTTGWLKL

SEQ ID NO: 45046 - protein, 11 aa, synthetic construct
AAWDTTGWIKI

SEQ ID NO: 45047 - protein, 12 aa, synthetic construct
AAWDEATGWFKT

SEQ ID NO: 45048 - protein, 13 aa, synthetic construct
AAWDRYTTGWFTI

SEQ ID NO: 45049 - protein, 12 aa, synthetic construct
AAWDSATGWFNI

SEQ ID NO: 45050 - protein, 12 aa, synthetic construct
AAWDSAPGWFKI

SEQ ID NO: 45051 - protein, 11 aa, synthetic construct
AAWDSAGWFKI

SEQ ID NO: 45052 - protein, 11 aa, synthetic construct
AAWDSACWFKI

SEQ ID NO: 45053 - protein, 10 aa, synthetic construct
AAWDRYYKEL

SEQ ID NO: 45054 - protein, 13 aa, synthetic construct
AAWDRYTTVLFKI

SEQ ID NO: 45055 - protein, 13 aa, synthetic construct
AAWDRYTTSWFKI

SEQ ID NO: 45056 - protein, 13 aa, synthetic construct
AAWDRYTTNWFKI

SEQ ID NO: 45057 - protein, 13 aa, synthetic construct
AAWDRYTTGWYKI

SEQ ID NO: 45058 - protein, 13 aa, synthetic construct
AAWDRYTTGWVKI

SEQ ID NO: 45059 - protein, 13 aa, synthetic construct
AAWDRYTTGWSKI

SEQ ID NO: 45060 - protein, 13 aa, synthetic construct
AAWDRYTTGWIKI

SEQ ID NO: 45061 - protein, 13 aa, synthetic construct
AAWDRYTTGWFTR

SEQ ID NO: 45062 - protein, 14 aa, synthetic construct
AAWDRYTTGWFKKL

SEQ ID NO: 45063 - protein, 13 aa, synthetic construct
AAWDSDTTSLFKI

SEQ ID NO: 45064 - protein, 10 aa, synthetic construct
AAWDRYTTGW

SEQ ID NO: 45065 - protein, 15 aa, synthetic construct
AAWDRYTTGLYYKKI

SEQ ID NO: 45066 - protein, 13 aa, synthetic construct
AAWDRYTTCLFKI

SEQ ID NO: 45067 - protein, 13 aa, synthetic construct
AAWDRYTPGLFKI

SEQ ID NO: 45068 - protein, 13 aa, synthetic construct
AAWDRYTKGWLKI

SEQ ID NO: 45069 - protein, 13 aa, synthetic construct
AAWDRYTIGWFKI

SEQ ID NO: 45070 - protein, 13 aa, synthetic construct
AAWDRYTAGWFKI

SEQ ID NO: 45071 - protein, 13 aa, synthetic construct
AAWDRYPTGWFKI

SEQ ID NO: 45072 - protein, 13 aa, synthetic construct
AAWDRYNTGWLNI

SEQ ID NO: 45073 - protein, 13 aa, synthetic construct
AAWDRYNPGWFKI

SEQ ID NO: 45074 - protein, 13 aa, synthetic construct
AAWDRYITGWFKI

SEQ ID NO: 45075 - protein, 10 aa, synthetic construct
AAWDRYHKKL

SEQ ID NO: 45076 - protein, 14 aa, synthetic construct
AAWDRVYTTGWLKI

SEQ ID NO: 45077 - protein, 12 aa, synthetic construct
AAWDSDTGWFKI

SEQ ID NO: 45078 - protein, 13 aa, synthetic construct
AAWDSGATGWFKI

SEQ ID NO: 45079 - protein, 11 aa, synthetic construct
AAWDTTGWFKK

SEQ ID NO: 45080 - protein, 14 aa, synthetic construct
AAWDTDGTKGWFKI

SEQ ID NO: 45081 - protein, 11 aa, synthetic construct
AAWDTTGWFGI

SEQ ID NO: 45082 - protein, 11 aa, synthetic construct
AAWDTTGLLKI

SEQ ID NO: 45083 - protein, 11 aa, synthetic construct
AAWDTTGCFKI

SEQ ID NO: 45084 - protein, 11 aa, synthetic construct
AAWDTTDWFKI

SEQ ID NO: 45085 - protein, 11 aa, synthetic construct
AAWDTTAWFKI

SEQ ID NO: 45086 - protein, 11 aa, synthetic construct
AAWDTTACLKI

SEQ ID NO: 45087 - protein, 14 aa, synthetic construct
AAWDTSHTTGWLNI

SEQ ID NO: 45088 - protein, 14 aa, synthetic construct
AAWDTSHNTVWFKI

SEQ ID NO: 45089 - protein, 8 aa, synthetic construct
AAWDTRGW

SEQ ID NO: 45090 - protein, 11 aa, synthetic construct
AAWDTPRCVEI

SEQ ID NO: 45091 - protein, 11 aa, synthetic construct
AAWDTPGGFKI

SEQ ID NO: 45092 - protein, 11 aa, synthetic construct
AAWDTNGLFKI

SEQ ID NO: 45093 - protein, 12 aa, synthetic construct
AAWDTGTGWFKI

SEQ ID NO: 45094 - protein, 11 aa, synthetic construct
AAWDTAGWLKI

SEQ ID NO: 45095 - protein, 14 aa, synthetic construct
AAWDSGGNTGWFKI

SEQ ID NO: 45096 - protein, 9 aa, synthetic construct
AAWDSYKKL

SEQ ID NO: 45097 - protein, 9 aa, synthetic construct
AAWDSWFKI

SEQ ID NO: 45098 - protein, 11 aa, synthetic construct
AAWDSTRLFKI

SEQ ID NO: 45099 - protein, 11 aa, synthetic construct
AAWDSTGWSKV

SEQ ID NO: 45100 - protein, 11 aa, synthetic construct
AAWDSTGWSKI

SEQ ID NO: 45101 - protein, 11 aa, synthetic construct
AAWDSTGRFKI

SEQ ID NO: 45102 - protein, 11 aa, synthetic construct
AAWDSTGLFKI

SEQ ID NO: 45103 - protein, 11 aa, synthetic construct
AAWDSTDWFKI

SEQ ID NO: 45104 - protein, 13 aa, synthetic construct
AAWDSRTTGWFKK

SEQ ID NO: 45105 - protein, 11 aa, synthetic construct
AAWDSPGWFKI

SEQ ID NO: 45106 - protein, 13 aa, synthetic construct
AAWDSPATGWFKI

SEQ ID NO: 45107 - protein, 11 aa, synthetic construct
AAWDSNGWFKL

SEQ ID NO: 45108 - protein, 11 aa, synthetic construct
AAWDSLGWFKV

SEQ ID NO: 45109 - protein, 10 aa, synthetic construct
AAWDWYCKKL

SEQ ID NO: 45110 - protein, 10 aa, synthetic construct
AAWDWYYKKF

SEQ ID NO: 45111 - protein, 10 aa, synthetic construct
AAWDWYYKKK

SEQ ID NO: 45112 - protein, 12 aa, synthetic construct
AAWDYWTGWFNI

SEQ ID NO: 45113 - protein, 11 aa, synthetic construct
AAWEGTGWLKR

SEQ ID NO: 45114 - protein, 11 aa, synthetic construct
AAWEGPGWFKI

SEQ ID NO: 45115 - protein, 13 aa, synthetic construct
AAWEGNTTGWFKI

SEQ ID NO: 45116 - protein, 11 aa, synthetic construct
AAWEGHGWLKR

SEQ ID NO: 45117 - protein, 10 aa, synthetic construct
AAWEGDYKKL

SEQ ID NO: 45118 - protein, 9 aa, synthetic construct
AAWEFYNKL

SEQ ID NO: 45119 - protein, 9 aa, synthetic construct
AAWEFYKKL

SEQ ID NO: 45120 - protein, 9 aa, synthetic construct
AAWEEYKKL

SEQ ID NO: 45121 - protein, 12 aa, synthetic construct
AAWEEATGWLKI

SEQ ID NO: 45122 - protein, 12 aa, synthetic construct
AAWEDTTGWFKI

SEQ ID NO: 45123 - protein, 12 aa, synthetic construct
AAWEDNTGWLEI

SEQ ID NO: 45124 - protein, 11 aa, synthetic construct
AAWEATSWFKI

SEQ ID NO: 45125 - protein, 13 aa, synthetic construct
AAWDYYTTGWFKI

SEQ ID NO: 45126 - protein, 14 aa, synthetic construct
AAWDYWLATGWFKI

SEQ ID NO: 45127 - protein, 12 aa, synthetic construct
AAWEHNTCWLKI

SEQ ID NO: 45128 - protein, 12 aa, synthetic construct
AAWDYVTGWSKI

SEQ ID NO: 45129 - protein, 12 aa, synthetic construct
AAWDYVTGWLKI

SEQ ID NO: 45130 - protein, 12 aa, synthetic construct
AAWDYVTGWFEI

SEQ ID NO: 45131 - protein, 8 aa, synthetic construct
AAWDYVKL

SEQ ID NO: 45132 - protein, 14 aa, synthetic construct
AAWDYTYTPGWFKI

SEQ ID NO: 45133 - protein, 12 aa, synthetic construct
AAWDYTTVWFNI

SEQ ID NO: 45134 - protein, 12 aa, synthetic construct
AAWDYTTGWLRI

SEQ ID NO: 45135 - protein, 12 aa, synthetic construct
AAWDYTTGWLQI

SEQ ID NO: 45136 - protein, 12 aa, synthetic construct
AAWDYTTGWLNL

SEQ ID NO: 45137 - protein, 12 aa, synthetic construct
AAWDYTTGWLNI

SEQ ID NO: 45138 - protein, 12 aa, synthetic construct
AAWDYTTGWLKT

SEQ ID NO: 45139 - protein, 12 aa, synthetic construct
AAWDYTTGWLKL

SEQ ID NO: 45140 - protein, 12 aa, synthetic construct
AAWDYTTGWFKM

SEQ ID NO: 45141 - protein, 11 aa, synthetic construct
AAWEHKRWFKI

SEQ ID NO: 45142 - protein, 12 aa, synthetic construct
AAWEHNTGWFNI

SEQ ID NO: 45143 - protein, 10 aa, synthetic construct
AAWDWYYKTL

SEQ ID NO: 45144 - protein, 12 aa, synthetic construct
AAWEHTTGWFKL

SEQ ID NO: 45145 - protein, 13 aa, synthetic construct
AAWELGTTGFFKI

SEQ ID NO: 45146 - protein, 13 aa, synthetic construct
AAWELGTTCWFKI

SEQ ID NO: 45147 - protein, 13 aa, synthetic construct
AAWELGTPGWFTR

SEQ ID NO: 45148 - protein, 13 aa, synthetic construct
AAWELGATGWFKI

SEQ ID NO: 45149 - protein, 10 aa, synthetic construct
AAWEKYYKKL

SEQ ID NO: 45150 - protein, 11 aa, synthetic construct
AAWEKTGWFKI

SEQ ID NO: 45151 - protein, 12 aa, synthetic construct
AAWEKGHGWLKI

SEQ ID NO: 45152 - protein, 13 aa, synthetic construct
AAWEIGTPGWFKI

SEQ ID NO: 45153 - protein, 9 aa, synthetic construct
AAWEHYKKL

SEQ ID NO: 45154 - protein, 12 aa, synthetic construct
AAWEHTTGWYKI

SEQ ID NO: 45155 - protein, 12 aa, synthetic construct
AAWEHTTGWSKI

SEQ ID NO: 45156 - protein, 12 aa, synthetic construct
AAWEHTTGWLKM

SEQ ID NO: 45157 - protein, 12 aa, synthetic construct
AAWEHTTGWFMI

SEQ ID NO: 45158 - protein, 11 aa, synthetic construct
AAWEHTTGWFK

SEQ ID NO: 45159 - protein, 12 aa, synthetic construct
AAWEHNTGWLEI

SEQ ID NO: 45160 - protein, 10 aa, synthetic construct
AAWEHTTGWF

SEQ ID NO: 45161 - protein, 12 aa, synthetic construct
AAWEHTTGWCKI

SEQ ID NO: 45162 - protein, 12 aa, synthetic construct
AAWEHTTGRFNI

SEQ ID NO: 45163 - protein, 12 aa, synthetic construct
AAWEHTTGLFKI

SEQ ID NO: 45164 - protein, 12 aa, synthetic construct
AAWEHTTGGFKI

SEQ ID NO: 45165 - protein, 12 aa, synthetic construct
AAWEHTTGCFNI

SEQ ID NO: 45166 - protein, 12 aa, synthetic construct
AAWEHTPGWFQI

SEQ ID NO: 45167 - protein, 12 aa, synthetic construct
AAWEHTNGWFKI

SEQ ID NO: 45168 - protein, 12 aa, synthetic construct
AAWEHSTGWFKI

SEQ ID NO: 45169 - protein, 12 aa, synthetic construct
AAWEHSTGWFEI

SEQ ID NO: 45170 - protein, 14 aa, synthetic construct
AAWEHSHTTGWFKI

SEQ ID NO: 45171 - protein, 12 aa, synthetic construct
AAWEHPTGWFKI

SEQ ID NO: 45172 - protein, 12 aa, synthetic construct
AAWEHNTGWLKI

SEQ ID NO: 45173 - protein, 12 aa, synthetic construct
AAWDYTTGWCKI

SEQ ID NO: 45174 - protein, 12 aa, synthetic construct
AAWDYTTGRFKK

SEQ ID NO: 45175 - protein, 12 aa, synthetic construct
AAWDYTTCWFMI

SEQ ID NO: 45176 - protein, 12 aa, synthetic construct
AAWDYGTDWFKI

SEQ ID NO: 45177 - protein, 12 aa, synthetic construct
AAWDYNTGWFKT

SEQ ID NO: 45178 - protein, 12 aa, synthetic construct
AAWDYNTGWFEI

SEQ ID NO: 45179 - protein, 12 aa, synthetic construct
AAWDYNTGLFKI

SEQ ID NO: 45180 - protein, 12 aa, synthetic construct
AAWDYNTCWLMI

SEQ ID NO: 45181 - protein, 12 aa, synthetic construct
AAWDYNKGWLKI

SEQ ID NO: 45182 - protein, 12 aa, synthetic construct
AAWDYHTGWFEI

SEQ ID NO: 45183 - protein, 12 aa, synthetic construct
AAWDYGTSWFKI

SEQ ID NO: 45184 - protein, 12 aa, synthetic construct
AAWDYGTGWVQI

SEQ ID NO: 45185 - protein, 12 aa, synthetic construct
AAWDYGTGWLKK

SEQ ID NO: 45186 - protein, 12 aa, synthetic construct
AAWDYGTGWIKI

SEQ ID NO: 45187 - protein, 12 aa, synthetic construct
AAWDYGTGWFNS

SEQ ID NO: 45188 - protein, 12 aa, synthetic construct
AAWDYGTGWFNL

SEQ ID NO: 45189 - protein, 10 aa, synthetic construct
AAWDYGTGWF

SEQ ID NO: 45190 - protein, 14 aa, synthetic construct
AAWDYGPSTGWFKI

SEQ ID NO: 45191 - protein, 12 aa, synthetic construct
AAWDYTTCWFKK

SEQ ID NO: 45192 - protein, 12 aa, synthetic construct
AAWDYGPGWLKI

SEQ ID NO: 45193 - protein, 12 aa, synthetic construct
AAWDYGPGWFKR

SEQ ID NO: 45194 - protein, 12 aa, synthetic construct
AAWDYGNGWFKI

SEQ ID NO: 45195 - protein, 12 aa, synthetic construct
AAWDYGIGWFKI

SEQ ID NO: 45196 - protein, 12 aa, synthetic construct
AAWDYGHGWFKI

SEQ ID NO: 45197 - protein, 13 aa, synthetic construct
AAWDYFTTGWFNI

SEQ ID NO: 45198 - protein, 12 aa, synthetic construct
AAWDYETGWFKI

SEQ ID NO: 45199 - protein, 8 aa, synthetic construct
AAWDYEKL

SEQ ID NO: 45200 - protein, 13 aa, synthetic construct
AAWDYDATGWFKI

SEQ ID NO: 45201 - protein, 12 aa, synthetic construct
AAWDYATGWLKI

SEQ ID NO: 45202 - protein, 12 aa, synthetic construct
AAWDYATGCFNI

SEQ ID NO: 45203 - protein, 12 aa, synthetic construct
AAWDYASGWFKI

SEQ ID NO: 45204 - protein, 10 aa, synthetic construct
AAWDWYYNKH

SEQ ID NO: 45205 - protein, 12 aa, synthetic construct
AAWDYNTGWFNI

SEQ ID NO: 45206 - protein, 12 aa, synthetic construct
AAWDYNTGWVKI

SEQ ID NO: 45207 - protein, 11 aa, synthetic construct
AAWDYNYHKKL

SEQ ID NO: 45208 - protein, 11 aa, synthetic construct
AAWDYNYYKKH

SEQ ID NO: 45209 - protein, 12 aa, synthetic construct
AAWDYTSGWFKI

SEQ ID NO: 45210 - protein, 12 aa, synthetic construct
AAWDYTSGWFEI

SEQ ID NO: 45211 - protein, 12 aa, synthetic construct
AAWDYTPGWLKI

SEQ ID NO: 45212 - protein, 12 aa, synthetic construct
AAWDYTNGWFNI

SEQ ID NO: 45213 - protein, 12 aa, synthetic construct
AAWDYTKGWFKI

SEQ ID NO: 45214 - protein, 12 aa, synthetic construct
AAWDYTAGWLTI

SEQ ID NO: 45215 - protein, 12 aa, synthetic construct
AAWDYTAGCYKI

SEQ ID NO: 45216 - protein, 9 aa, synthetic construct
AAWDYSKKL

SEQ ID NO: 45217 - protein, 12 aa, synthetic construct
AAWDYRVGWFKI

SEQ ID NO: 45218 - protein, 12 aa, synthetic construct
AAWDYRTGWFRI

SEQ ID NO: 45219 - protein, 13 aa, synthetic construct
AAWDYRPTGWFKI

SEQ ID NO: 45220 - protein, 12 aa, synthetic construct
AAWDYRNGRLKI

SEQ ID NO: 45221 - protein, 14 aa, synthetic construct
AAWDYRGATGWFKI

SEQ ID NO: 45222 - protein, 13 aa, synthetic construct
AAWDYRATGWFKI

SEQ ID NO: 45223 - protein, 12 aa, synthetic construct
AAWDYPTSWFKI

SEQ ID NO: 45224 - protein, 12 aa, synthetic construct
AAWDYPTGWVQI

SEQ ID NO: 45225 - protein, 12 aa, synthetic construct
AAWDYPTGWSKI

SEQ ID NO: 45226 - protein, 12 aa, synthetic construct
AAWDYPTGWFQI

SEQ ID NO: 45227 - protein, 12 aa, synthetic construct
AAWDYPTGWFMI

SEQ ID NO: 45228 - protein, 12 aa, synthetic construct
AAWDYPTGWFKL

SEQ ID NO: 45229 - protein, 12 aa, synthetic construct
AAWDYPTGGFKI

SEQ ID NO: 45230 - protein, 12 aa, synthetic construct
AAWDYPTGCSKI

SEQ ID NO: 45231 - protein, 12 aa, synthetic construct
AAWDYPSGGFGM

SEQ ID NO: 45232 - protein, 12 aa, synthetic construct
AAWDYPPGGFKI

SEQ ID NO: 45233 - protein, 12 aa, synthetic construct
AAWDYPNGWLKI

SEQ ID NO: 45234 - protein, 12 aa, synthetic construct
AAWDYPKGWLKI

SEQ ID NO: 45235 - protein, 11 aa, synthetic construct
AAWDYNYYKKL

SEQ ID NO: 45236 - protein, 13 aa, synthetic construct
AAWDRVTTGWFKI

SEQ ID NO: 45237 - protein, 13 aa, synthetic construct
AAWDRVTPGWFKI

SEQ ID NO: 45238 - protein, 12 aa, synthetic construct
AAWDRVTCWFKI

SEQ ID NO: 45239 - protein, 11 aa, synthetic construct
AAWDLNYYKKL

SEQ ID NO: 45240 - protein, 13 aa, synthetic construct
AAWDMDTTGLFKI

SEQ ID NO: 45241 - protein, 10 aa, synthetic construct
AAWDLYYKKH

SEQ ID NO: 45242 - protein, 13 aa, synthetic construct
AAWDLYNNGWLKI

SEQ ID NO: 45243 - protein, 13 aa, synthetic construct
AAWDLWTTGWFNI

SEQ ID NO: 45244 - protein, 13 aa, synthetic construct
AAWDLWTSGLFKI

SEQ ID NO: 45245 - protein, 13 aa, synthetic construct
AAWDLWTNGWFKI

SEQ ID NO: 45246 - protein, 13 aa, synthetic construct
AAWDLWNTGWFKI

SEQ ID NO: 45247 - protein, 14 aa, synthetic construct
AAWDLVYTTGWFTI

SEQ ID NO: 45248 - protein, 14 aa, synthetic construct
AAWDLVYNTGCFKI

SEQ ID NO: 45249 - protein, 13 aa, synthetic construct
AAWDLVTTGLFKI

SEQ ID NO: 45250 - protein, 12 aa, synthetic construct
AAWDLSTGWFKI

SEQ ID NO: 45251 - protein, 13 aa, synthetic construct
AAWDLRTTGWLKI

SEQ ID NO: 45252 - protein, 10 aa, synthetic construct
AAWDLRRGGW

SEQ ID NO: 45253 - protein, 13 aa, synthetic construct
AAWDLLTTGWFKI

SEQ ID NO: 45254 - protein, 13 aa, synthetic construct
AAWDMETKGWLKI

SEQ ID NO: 45255 - protein, 13 aa, synthetic construct
AAWDLGTTRWFKI

SEQ ID NO: 45256 - protein, 13 aa, synthetic construct
AAWDLGTTGWYTI

SEQ ID NO: 45257 - protein, 13 aa, synthetic construct
AAWDLGTTGWLKM

SEQ ID NO: 45258 - protein, 12 aa, synthetic construct
AAWDLGTTGWFK

SEQ ID NO: 45259 - protein, 13 aa, synthetic construct
AAWDLGTTGSFKI

SEQ ID NO: 45260 - protein, 13 aa, synthetic construct
AAWDLGTTGRFKV

SEQ ID NO: 45261 - protein, 13 aa, synthetic construct
AAWDLGTTGLLNI

SEQ ID NO: 45262 - protein, 13 aa, synthetic construct
AAWDLGTTGLFMI

SEQ ID NO: 45263 - protein, 13 aa, synthetic construct
AAWDLGTTGLFKT

SEQ ID NO: 45264 - protein, 13 aa, synthetic construct
AAWDLGTTGLFEI

SEQ ID NO: 45265 - protein, 13 aa, synthetic construct
AAWDLGTTGGFKI

SEQ ID NO: 45266 - protein, 9 aa, synthetic construct
AAWDLGTTG

SEQ ID NO: 45267 - protein, 13 aa, synthetic construct
AAWDLGTTCWLYI

SEQ ID NO: 45268 - protein, 13 aa, synthetic construct
AAWDMDTTGWSKI

SEQ ID NO: 45269 - protein, 12 aa, synthetic construct
AAWDMGTGWFKI

SEQ ID NO: 45270 - protein, 11 aa, synthetic construct
AAWDPSGWFKI

SEQ ID NO: 45271 - protein, 14 aa, synthetic construct
AAWDPAHTPGWFKI

SEQ ID NO: 45272 - protein, 11 aa, synthetic construct
AAWDPPGWFKR

SEQ ID NO: 45273 - protein, 11 aa, synthetic construct
AAWDPPGWFEV

SEQ ID NO: 45274 - protein, 11 aa, synthetic construct
AAWDPPGGFKI

SEQ ID NO: 45275 - protein, 13 aa, synthetic construct
AAWDPNTTGWVKI

SEQ ID NO: 45276 - protein, 13 aa, synthetic construct
AAWDPNTTGWFKI

SEQ ID NO: 45277 - protein, 11 aa, synthetic construct
AAWDPNGLFKI

SEQ ID NO: 45278 - protein, 11 aa, synthetic construct
AAWDPKGWFKL

SEQ ID NO: 45279 - protein, 11 aa, synthetic construct
AAWDPKGLFKI

SEQ ID NO: 45280 - protein, 14 aa, synthetic construct
AAWDPAPTPGWFKI

SEQ ID NO: 45281 - protein, 14 aa, synthetic construct
AAWDPAHTTGWFKR

SEQ ID NO: 45282 - protein, 14 aa, synthetic construct
AAWDPAHTTGGFTI

SEQ ID NO: 45283 - protein, 14 aa, synthetic construct
AAWDPAHTTGGFKI

SEQ ID NO: 45284 - protein, 14 aa, synthetic construct
AAWDPAHTTGCFKI

SEQ ID NO: 45285 - protein, 12 aa, synthetic construct
AAWDNTTGWLNI

SEQ ID NO: 45286 - protein, 10 aa, synthetic construct
AAWDMGYKKL

SEQ ID NO: 45287 - protein, 12 aa, synthetic construct
AAWDNTTGWLKT

SEQ ID NO: 45288 - protein, 12 aa, synthetic construct
AAWDNTTGWLKI

SEQ ID NO: 45289 - protein, 12 aa, synthetic construct
AAWDNTTGWFNI

SEQ ID NO: 45290 - protein, 12 aa, synthetic construct
AAWDNTTAWFKI

SEQ ID NO: 45291 - protein, 15 aa, synthetic construct
AAWDNTPWTTGWFKI

SEQ ID NO: 45292 - protein, 11 aa, synthetic construct
AAWDNTGWLNI

SEQ ID NO: 45293 - protein, 11 aa, synthetic construct
AAWDNTGWFKL

SEQ ID NO: 45294 - protein, 11 aa, synthetic construct
AAWDNTGWCKI

SEQ ID NO: 45295 - protein, 11 aa, synthetic construct
AAWDNTCWFKI

SEQ ID NO: 45296 - protein, 12 aa, synthetic construct
AAWDNNTGWLTI

SEQ ID NO: 45297 - protein, 11 aa, synthetic construct
AAWDNAGWFKI

SEQ ID NO: 45298 - protein, 12 aa, synthetic construct
AAWDMSTGWFKI

SEQ ID NO: 45299 - protein, 12 aa, synthetic construct
AAWDMNTGWLKI

SEQ ID NO: 45300 - protein, 13 aa, synthetic construct
AAWDLGTTCWFNI

SEQ ID NO: 45301 - protein, 13 aa, synthetic construct
AAWDLGTTCCLKI

SEQ ID NO: 45302 - protein, 8 aa, synthetic construct
AAWDLGTT

SEQ ID NO: 45303 - protein, 11 aa, synthetic construct
AAWDFTGWFKL

SEQ ID NO: 45304 - protein, 12 aa, synthetic construct
AAWDHPAGWFKI

SEQ ID NO: 45305 - protein, 12 aa, synthetic construct
AAWDHATGWFKI

SEQ ID NO: 45306 - protein, 10 aa, synthetic construct
AAWDGYYKKL

SEQ ID NO: 45307 - protein, 13 aa, synthetic construct
AAWDGYTTGWFKI

SEQ ID NO: 45308 - protein, 14 aa, synthetic construct
AAWDGVYTTGWFKI

SEQ ID NO: 45309 - protein, 10 aa, synthetic construct
AAWDGGWFKI

SEQ ID NO: 45310 - protein, 10 aa, synthetic construct
AAWDGDYKKL

SEQ ID NO: 45311 - protein, 12 aa, synthetic construct
AAWDGDTGWFKI

SEQ ID NO: 45312 - protein, 10 aa, synthetic construct
AAWDGCYKKH

SEQ ID NO: 45313 - protein, 12 aa, synthetic construct
AAWDGAAGWFKI

SEQ ID NO: 45314 - protein, 9 aa, synthetic construct
AAWDFYNKH

SEQ ID NO: 45315 - protein, 9 aa, synthetic construct
AAWDFYKKR

SEQ ID NO: 45316 - protein, 13 aa, synthetic construct
AAWDFWTTGWFKI

SEQ ID NO: 45317 - protein, 10 aa, synthetic construct
AAWDFGWFKI

SEQ ID NO: 45318 - protein, 13 aa, synthetic construct
AAWDLGTPGWFKK

SEQ ID NO: 45319 - protein, 12 aa, synthetic construct
AAWDFGTGWLKI

SEQ ID NO: 45320 - protein, 9 aa, synthetic construct
AAWDFFKKL

SEQ ID NO: 45321 - protein, 12 aa, synthetic construct
AAWDFATGWFKL

SEQ ID NO: 45322 - protein, 9 aa, synthetic construct
AAWDEYKKL

SEQ ID NO: 45323 - protein, 14 aa, synthetic construct
AAWDERDTTGWFKI

SEQ ID NO: 45324 - protein, 12 aa, synthetic construct
AAWDEPTGWFVI

SEQ ID NO: 45325 - protein, 12 aa, synthetic construct
AAWDEGTGWFKI

SEQ ID NO: 45326 - protein, 13 aa, synthetic construct
AAWDEETTGWFKI

SEQ ID NO: 45327 - protein, 12 aa, synthetic construct
AAWDEDTRWFNI

SEQ ID NO: 45328 - protein, 12 aa, synthetic construct
AAWDEDTGCFKI

SEQ ID NO: 45329 - protein, 12 aa, synthetic construct
AAWDEATVWANI

SEQ ID NO: 45330 - protein, 11 aa, synthetic construct
AAWDEATGWLR

SEQ ID NO: 45331 - protein, 12 aa, synthetic construct
AAWDEATGWFTI

SEQ ID NO: 45332 - protein, 14 aa, synthetic construct
AAWDHSHNTGWLKI

SEQ ID NO: 45333 - protein, 14 aa, synthetic construct
AAWDHSHTTGWLNI

SEQ ID NO: 45334 - protein, 14 aa, synthetic construct
AAWDHSQTTGWFNI

SEQ ID NO: 45335 - protein, 12 aa, synthetic construct
AAWDHTPGGFKI

SEQ ID NO: 45336 - protein, 13 aa, synthetic construct
AAWDLGTNGWFKI

SEQ ID NO: 45337 - protein, 13 aa, synthetic construct
AAWDLGTAGLFKI

SEQ ID NO: 45338 - protein, 13 aa, synthetic construct
AAWDLGSTGWFKI

SEQ ID NO: 45339 - protein, 13 aa, synthetic construct
AAWDLGSTGLFKI

SEQ ID NO: 45340 - protein, 13 aa, synthetic construct
AAWDLGRSGLLFF

SEQ ID NO: 45341 - protein, 12 aa, synthetic construct
AAWDLGPTGWFK

SEQ ID NO: 45342 - protein, 13 aa, synthetic construct
AAWDLGPTGLFKI

SEQ ID NO: 45343 - protein, 13 aa, synthetic construct
AAWDLGPPGWFKI

SEQ ID NO: 45344 - protein, 13 aa, synthetic construct
AAWDLGNTGWVKI

SEQ ID NO: 45345 - protein, 13 aa, synthetic construct
AAWDLGNTGWSKI

SEQ ID NO: 45346 - protein, 13 aa, synthetic construct
AAWDLGNTGWLKI

SEQ ID NO: 45347 - protein, 13 aa, synthetic construct
AAWDLGATGWLKI

SEQ ID NO: 45348 - protein, 13 aa, synthetic construct
AAWDLGATGLFKI

SEQ ID NO: 45349 - protein, 13 aa, synthetic construct
AAWDLETPGWFKI

SEQ ID NO: 45350 - protein, 10 aa, synthetic construct
AAWDLDYKKL

SEQ ID NO: 45351 - protein, 10 aa, synthetic construct
AAWDLCYNKI

SEQ ID NO: 45352 - protein, 13 aa, synthetic construct
AAWDLCPTGWFKI

SEQ ID NO: 45353 - protein, 14 aa, synthetic construct
AAWDLAYTTGWFKI

SEQ ID NO: 45354 - protein, 12 aa, synthetic construct
AAWDLATGWFKI

SEQ ID NO: 45355 - protein, 13 aa, synthetic construct
AAWDKNTTGWFEI

SEQ ID NO: 45356 - protein, 9 aa, synthetic construct
AAWDIYKKL

SEQ ID NO: 45357 - protein, 9 aa, synthetic construct
AAWDIYKKI

SEQ ID NO: 45358 - protein, 13 aa, synthetic construct
AAWDIGTTGWSKI

SEQ ID NO: 45359 - protein, 12 aa, synthetic construct
AAWDHTTGWVEI

SEQ ID NO: 45360 - protein, 12 aa, synthetic construct
AAWDHTTGWFEI

SEQ ID NO: 45361 - protein, 12 aa, synthetic construct
AAWDHTTGLLKI

SEQ ID NO: 45362 - protein, 12 aa, synthetic construct
AAWDHTPGWFKI

SEQ ID NO: 45363 - protein, 14 aa, synthetic construct
AAWDPPHTTGWLKI

SEQ ID NO: 45364 - protein, 14 aa, synthetic construct
AAWDPSHATGWSKI

SEQ ID NO: 45365 - protein, 12 aa, synthetic construct
AAWDRTTGWFKK

SEQ ID NO: 45366 - protein, 11 aa, synthetic construct
AAWDQNYYKKL

SEQ ID NO: 45367 - protein, 13 aa, synthetic construct
AAWDRDTTDWFKI

SEQ ID NO: 45368 - protein, 13 aa, synthetic construct
AAWDRDTPGWFKR

SEQ ID NO: 45369 - protein, 13 aa, synthetic construct
AAWDRDTIGWFKI

SEQ ID NO: 45370 - protein, 13 aa, synthetic construct
AAWDRDSTGWFKI

SEQ ID NO: 45371 - protein, 13 aa, synthetic construct
AAWDRDPTGWFER

SEQ ID NO: 45372 - protein, 13 aa, synthetic construct
AAWDRDPPGWFKI

SEQ ID NO: 45373 - protein, 13 aa, synthetic construct
AAWDRDNTGWFNI

SEQ ID NO: 45374 - protein, 13 aa, synthetic construct
AAWDRDNTGWFKK

SEQ ID NO: 45375 - protein, 13 aa, synthetic construct
AAWDRDNKGWLKI

SEQ ID NO: 45376 - protein, 13 aa, synthetic construct
AAWDRDNAGWLEI

SEQ ID NO: 45377 - protein, 13 aa, synthetic construct
AAWDRCTTGWFKI

SEQ ID NO: 45378 - protein, 12 aa, synthetic construct
AAWDRATGWFKI

SEQ ID NO: 45379 - protein, 12 aa, synthetic construct
AAWDQTTGWFKI

SEQ ID NO: 45380 - protein, 13 aa, synthetic construct
AAWDQNTTRWFKI

SEQ ID NO: 45381 - protein, 9 aa, synthetic construct
AAWDRDTTG

SEQ ID NO: 45382 - protein, 13 aa, synthetic construct
AAWDQNTTRLFKI

SEQ ID NO: 45383 - protein, 13 aa, synthetic construct
AAWDQNTTGWYKI

SEQ ID NO: 45384 - protein, 13 aa, synthetic construct
AAWDQNTTGWLRI

SEQ ID NO: 45385 - protein, 13 aa, synthetic construct
AAWDQNTTGWLEI

SEQ ID NO: 45386 - protein, 13 aa, synthetic construct
AAWDQNTTGWIRI

SEQ ID NO: 45387 - protein, 13 aa, synthetic construct
AAWDQNTTGWFTR

SEQ ID NO: 45388 - protein, 13 aa, synthetic construct
AAWDQNTTGWFSI

SEQ ID NO: 45389 - protein, 13 aa, synthetic construct
AAWDQNTTGWFQI

SEQ ID NO: 45390 - protein, 13 aa, synthetic construct
AAWDQNTTGWFKT

SEQ ID NO: 45391 - protein, 13 aa, synthetic construct
AAWDQNTTGWFKM

SEQ ID NO: 45392 - protein, 13 aa, synthetic construct
AAWDQNTTGWFKL

SEQ ID NO: 45393 - protein, 11 aa, synthetic construct
AAWDQNTTGWF

SEQ ID NO: 45394 - protein, 13 aa, synthetic construct
AAWDQNTTGRVKI

SEQ ID NO: 45395 - protein, 13 aa, synthetic construct
AAWDRDTTDWFKT

SEQ ID NO: 45396 - protein, 13 aa, synthetic construct
AAWDRDTTGGFKI

SEQ ID NO: 45397 - protein, 14 aa, synthetic construct
AAWDPSHNPGWFKI

SEQ ID NO: 45398 - protein, 12 aa, synthetic construct
AAWDRGQGWFNI

SEQ ID NO: 45399 - protein, 13 aa, synthetic construct
AAWDRSTTGWFKI

SEQ ID NO: 45400 - protein, 13 aa, synthetic construct
AAWDRRTTGWFKI

SEQ ID NO: 45401 - protein, 12 aa, synthetic construct
AAWDRRTGWFKI

SEQ ID NO: 45402 - protein, 13 aa, synthetic construct
AAWDRNTTRWFKI

SEQ ID NO: 45403 - protein, 13 aa, synthetic construct
AAWDRNTTGWFTI

SEQ ID NO: 45404 - protein, 13 aa, synthetic construct
AAWDRHTPGWFKI

SEQ ID NO: 45405 - protein, 12 aa, synthetic construct
AAWDRGTSWFKI

SEQ ID NO: 45406 - protein, 12 aa, synthetic construct
AAWDRGTGWSKI

SEQ ID NO: 45407 - protein, 12 aa, synthetic construct
AAWDRGTGWIKI

SEQ ID NO: 45408 - protein, 12 aa, synthetic construct
AAWDRGTGWFKT

SEQ ID NO: 45409 - protein, 12 aa, synthetic construct
AAWDRGTGWFKL

SEQ ID NO: 45410 - protein, 8 aa, synthetic construct
AAWDRGTG

SEQ ID NO: 45411 - protein, 12 aa, synthetic construct
AAWDRGTCWFKI

SEQ ID NO: 45412 - protein, 12 aa, synthetic construct
AAWDRGPGGFKI

SEQ ID NO: 45413 - protein, 13 aa, synthetic construct
AAWDRDTTGGLKI

SEQ ID NO: 45414 - protein, 12 aa, synthetic construct
AAWDRGAGWLKI

SEQ ID NO: 45415 - protein, 13 aa, synthetic construct
AAWDRETTGWFKI

SEQ ID NO: 45416 - protein, 13 aa, synthetic construct
AAWDRDTTRWFKI

SEQ ID NO: 45417 - protein, 13 aa, synthetic construct
AAWDRDTTGWSKI

SEQ ID NO: 45418 - protein, 13 aa, synthetic construct
AAWDRDTTGWLKK

SEQ ID NO: 45419 - protein, 13 aa, synthetic construct
AAWDRDTTGWFTI

SEQ ID NO: 45420 - protein, 13 aa, synthetic construct
AAWDRDTTGWFQI

SEQ ID NO: 45421 - protein, 13 aa, synthetic construct
AAWDRDTTGWFMI

SEQ ID NO: 45422 - protein, 13 aa, synthetic construct
AAWDRDTTGWFKT

SEQ ID NO: 45423 - protein, 13 aa, synthetic construct
AAWDRDTTGWFKR

SEQ ID NO: 45424 - protein, 13 aa, synthetic construct
AAWDRDTTGWFKL

SEQ ID NO: 45425 - protein, 12 aa, synthetic construct
AAWDRDTTGWFK

SEQ ID NO: 45426 - protein, 13 aa, synthetic construct
AAWDRDTTGLVKI

SEQ ID NO: 45427 - protein, 13 aa, synthetic construct
AAWDQNTTGRIKI

SEQ ID NO: 45428 - protein, 13 aa, synthetic construct
AAWDQNTTGGFKI

SEQ ID NO: 45429 - protein, 9 aa, synthetic construct
AAWDQNTTG

SEQ ID NO: 45430 - protein, 14 aa, synthetic construct
AAWDPSHTTGWLNI

SEQ ID NO: 45431 - protein, 11 aa, synthetic construct
AAWDPTGWCRR

SEQ ID NO: 45432 - protein, 7 aa, synthetic construct
AAWDPTG

SEQ ID NO: 45433 - protein, 11 aa, synthetic construct
AAWDPTCWLKI

SEQ ID NO: 45434 - protein, 11 aa, synthetic construct
AAWDPTAWFKI

SEQ ID NO: 45435 - protein, 14 aa, synthetic construct
AAWDPSRSTGWFEI

SEQ ID NO: 45436 - protein, 14 aa, synthetic construct
AAWDPSQTTVWFNI

SEQ ID NO: 45437 - protein, 14 aa, synthetic construct
AAWDPSQTTGWLKI

SEQ ID NO: 45438 - protein, 14 aa, synthetic construct
AAWDPSQNTGWLKI

SEQ ID NO: 45439 - protein, 14 aa, synthetic construct
AAWDPSQNTGWFKI

SEQ ID NO: 45440 - protein, 14 aa, synthetic construct
AAWDPSNTTVWFNI

SEQ ID NO: 45441 - protein, 14 aa, synthetic construct
AAWDPSNTTGWFKI

SEQ ID NO: 45442 - protein, 14 aa, synthetic construct
AAWDPSLTTGWFKI

SEQ ID NO: 45443 - protein, 14 aa, synthetic construct
AAWDPSHTTSWFKI

SEQ ID NO: 45444 - protein, 14 aa, synthetic construct
AAWDPSHTTGWFTI

SEQ ID NO: 45445 - protein, 13 aa, synthetic construct
AAWDQNTTCWFNI

SEQ ID NO: 45446 - protein, 14 aa, synthetic construct
AAWDPSHTTGWFQI

SEQ ID NO: 45447 - protein, 14 aa, synthetic construct
AAWDPSHTTGWFNK

SEQ ID NO: 45448 - protein, 14 aa, synthetic construct
AAWDPSHTTGWFKL

SEQ ID NO: 45449 - protein, 11 aa, synthetic construct
AAWDPSHTTGW

SEQ ID NO: 45450 - protein, 14 aa, synthetic construct
AAWDPSHTTGRFRI

SEQ ID NO: 45451 - protein, 14 aa, synthetic construct
AAWDPSHTTGLFNI

SEQ ID NO: 45452 - protein, 14 aa, synthetic construct
AAWDPSHTTGCFKI

SEQ ID NO: 45453 - protein, 14 aa, synthetic construct
AAWDPSHTTDWFKI

SEQ ID NO: 45454 - protein, 14 aa, synthetic construct
AAWDPSHTSGWFKI

SEQ ID NO: 45455 - protein, 14 aa, synthetic construct
AAWDPSHTQGWFNI

SEQ ID NO: 45456 - protein, 14 aa, synthetic construct
AAWDPSHTNGWLKI

SEQ ID NO: 45457 - protein, 14 aa, synthetic construct
AAWDPSHNTGWFNI

SEQ ID NO: 45458 - protein, 14 aa, synthetic construct
AAWDPSHNTGWFKR

SEQ ID NO: 45459 - protein, 9 aa, synthetic construct
AAWDPTGWF

SEQ ID NO: 45460 - protein, 10 aa, synthetic construct
AAWDPTGWFK

SEQ ID NO: 45461 - protein, 11 aa, synthetic construct
AAWDPTGWFMI

SEQ ID NO: 45462 - protein, 11 aa, synthetic construct
AAWDPTGWLKM

SEQ ID NO: 45463 - protein, 13 aa, synthetic construct
AAWDQNTTCWFKI

SEQ ID NO: 45464 - protein, 8 aa, synthetic construct
AAWDQNTT

SEQ ID NO: 45465 - protein, 13 aa, synthetic construct
AAWDQNTNGWFKI

SEQ ID NO: 45466 - protein, 13 aa, synthetic construct
AAWDQNTKGWLKI

SEQ ID NO: 45467 - protein, 13 aa, synthetic construct
AAWDQNNTGWFNI

SEQ ID NO: 45468 - protein, 13 aa, synthetic construct
AAWDQNNTGRFKI

SEQ ID NO: 45469 - protein, 13 aa, synthetic construct
AAWDQNNTGLFKI

SEQ ID NO: 45470 - protein, 13 aa, synthetic construct
AAWDQNNPGWFKI

SEQ ID NO: 45471 - protein, 13 aa, synthetic construct
AAWDQNNNGWFKI

SEQ ID NO: 45472 - protein, 13 aa, synthetic construct
AAWDQNNAGWFKI

SEQ ID NO: 45473 - protein, 13 aa, synthetic construct
AAWDQNKTGCFKI

SEQ ID NO: 45474 - protein, 13 aa, synthetic construct
AAWDQNITGWFKI

SEQ ID NO: 45475 - protein, 13 aa, synthetic construct
AAWDQKTTRWFNI

SEQ ID NO: 45476 - protein, 13 aa, synthetic construct
AAWDQKTTGWVKI

SEQ ID NO: 45477 - protein, 13 aa, synthetic construct
AAWDQKTTGLFKI

SEQ ID NO: 45478 - protein, 13 aa, synthetic construct
AAWDQITTGWFKI

SEQ ID NO: 45479 - protein, 13 aa, synthetic construct
AAWDQHTTGWFKI

SEQ ID NO: 45480 - protein, 13 aa, synthetic construct
AAWDQHTPGWFKI

SEQ ID NO: 45481 - protein, 12 aa, synthetic construct
AAWDQATGWFKI

SEQ ID NO: 45482 - protein, 13 aa, synthetic construct
AAWDPYTTGWFKI

SEQ ID NO: 45483 - protein, 14 aa, synthetic construct
AAWDPYHTTGWFKI

SEQ ID NO: 45484 - protein, 12 aa, synthetic construct
AAWDPTTGWFEI

SEQ ID NO: 45485 - protein, 14 aa, synthetic construct
AAWDPTQNTGRLKI

SEQ ID NO: 45486 - protein, 14 aa, synthetic construct
AAWDPTHTTGWLKI

SEQ ID NO: 45487 - protein, 11 aa, synthetic construct
AAWDPTGWYKI

SEQ ID NO: 45488 - protein, 11 aa, synthetic construct
AAWDPTGWVKV

SEQ ID NO: 45489 - protein, 11 aa, synthetic construct
AAWDPTGWLTI

SEQ ID NO: 45490 - protein, 13 aa, synthetic construct
YAWDQKTTGWLYI

SEQ ID NO: 45491 - protein, 11 aa, synthetic construct
AAWDTTGWFKI

SEQ ID NO: 45492 - protein, 12 aa, synthetic construct
AAWDYTTGWFKI

SEQ ID NO: 45493 - protein, 12 aa, synthetic construct
AAWGYTTGWFKI

SEQ ID NO: 45494 - protein, 10 aa, synthetic construct
AAWGTGWFKI

SEQ ID NO: 45495 - protein, 11 aa, synthetic construct
AAWGTTGWFKI

SEQ ID NO: 45496 - protein, 12 aa, synthetic construct
AAWAYTTGWFKI

SEQ ID NO: 45497 - protein, 12 aa, synthetic construct
AAWDDTTGWFKI

SEQ ID NO: 45498 - protein, 12 aa, synthetic construct
AAWDWTTGWFKI

SEQ ID NO: 45499 - protein, 11 aa, synthetic construct
AAWYTTGWFKI

SEQ ID NO: 45500 - protein, 12 aa, synthetic construct
AAWEYTTGWFKI

SEQ ID NO: 45501 - protein, 12 aa, synthetic construct
AAWDYPTGWFKI

SEQ ID NO: 45502 - protein, 11 aa, synthetic construct
AAWDATGWFKI

SEQ ID NO: 45503 - protein, 12 aa, synthetic construct
AAWDLGTGWFKI

SEQ ID NO: 45504 - protein, 11 aa, synthetic construct
AAWDPTGWFKI

SEQ ID NO: 45505 - protein, 10 aa, synthetic construct
AADTTGWFKI

SEQ ID NO: 45506 - protein, 12 aa, synthetic construct
AAWDHTTGWFKI

SEQ ID NO: 45507 - protein, 11 aa, synthetic construct
AAWETTGWFKI

SEQ ID NO: 45508 - protein, 11 aa, synthetic construct
AAWDSTGWFKI

SEQ ID NO: 45509 - protein, 12 aa, synthetic construct
AAWGDTTGWFKI

SEQ ID NO: 45510 - protein, 12 aa, synthetic construct
AAWDCTTGWFKI

SEQ ID NO: 45511 - protein, 12 aa, synthetic construct
AAWENTTGWFKI

SEQ ID NO: 45512 - protein, 13 aa, synthetic construct
AAWDPYTTGWFKI

SEQ ID NO: 45513 - protein, 10 aa, synthetic construct
AAWVTGWFKI

SEQ ID NO: 45514 - protein, 12 aa, synthetic construct
AAWDSATGWFKI

SEQ ID NO: 45515 - protein, 12 aa, synthetic construct
AAWDFTTGWFKI

SEQ ID NO: 45516 - protein, 10 aa, synthetic construct
AAWDTGWFKI

SEQ ID NO: 45517 - protein, 12 aa, synthetic construct
AAWAHTTGWFKI

SEQ ID NO: 45518 - protein, 12 aa, synthetic construct
AAWGHTTGWFKI

SEQ ID NO: 45519 - protein, 12 aa, synthetic construct
AAWDWGTGWFKI

SEQ ID NO: 45520 - protein, 12 aa, synthetic construct
AAWDRATGWFKI

SEQ ID NO: 45521 - protein, 12 aa, synthetic construct
AAWGVTTGWFKI

SEQ ID NO: 45522 - protein, 8 aa, synthetic construct
AAWDWFKI

SEQ ID NO: 45523 - protein, 11 aa, synthetic construct
AAWNTTGWFKI

SEQ ID NO: 45524 - protein, 12 aa, synthetic construct
AAWDYATGWFKI

SEQ ID NO: 45525 - protein, 11 aa, synthetic construct
AAWDCTGWFKI

SEQ ID NO: 45526 - protein, 11 aa, synthetic construct
AAWEATGWFKI

SEQ ID NO: 45527 - protein, 9 aa, synthetic construct
AAWGGWFKI

SEQ ID NO: 45528 - protein, 12 aa, synthetic construct
AAWDRTTGWFKI

SEQ ID NO: 45529 - protein, 10 aa, synthetic construct
AAWDFGWFKI

SEQ ID NO: 45530 - protein, 13 aa, synthetic construct
AAWGNYTTGWFKI

SEQ ID NO: 45531 - protein, 11 aa, synthetic construct
AAWDSPGWFKI

SEQ ID NO: 45532 - protein, 10 aa, synthetic construct
AAWDGGWFKI

SEQ ID NO: 45533 - protein, 13 aa, synthetic construct
AAWDSYTTGWFKI

SEQ ID NO: 45534 - protein, 9 aa, synthetic construct
AAWDYYKKL

SEQ ID NO: 45535 - protein, 12 aa, synthetic construct
AAWEDTTGWFKI

SEQ ID NO: 45536 - protein, 9 aa, synthetic construct
AAWVRWFKI

SEQ ID NO: 45537 - protein, 12 aa, synthetic construct
AAWVHTTGWFKI

SEQ ID NO: 45538 - protein, 9 aa, synthetic construct
AAWGYYKKL

SEQ ID NO: 45539 - protein, 12 aa, synthetic construct
AAWDYITGWFKI

SEQ ID NO: 45540 - protein, 12 aa, synthetic construct
AAWDNTTGWFKI

SEQ ID NO: 45541 - protein, 10 aa, synthetic construct
AAWETGWFKI

SEQ ID NO: 45542 - protein, 11 aa, synthetic construct
AAWHTTGWFKI

SEQ ID NO: 45543 - protein, 12 aa, synthetic construct
AAWDFATGWFKI

SEQ ID NO: 45544 - protein, 12 aa, synthetic construct
AAWDSGTGWFKI

SEQ ID NO: 45545 - protein, 13 aa, synthetic construct
AAWDSDTTGWFKI

SEQ ID NO: 45546 - protein, 12 aa, synthetic construct
AAWARTTGWFKI

SEQ ID NO: 45547 - protein, 13 aa, synthetic construct
AAWDSGATGWFKI

SEQ ID NO: 45548 - protein, 11 aa, synthetic construct
AAWDCAGWFKI

SEQ ID NO: 45549 - protein, 9 aa, synthetic construct
AAWDCWFKI

SEQ ID NO: 45550 - protein, 11 aa, synthetic construct
AAGYTTGWFKI

SEQ ID NO: 45551 - protein, 12 aa, synthetic construct
AAWGGTTGWFKI

SEQ ID NO: 45552 - protein, 11 aa, synthetic construct
AAWATTGWFKI

SEQ ID NO: 45553 - protein, 10 aa, synthetic construct
AAWPTGWFKI

SEQ ID NO: 45554 - protein, 11 aa, synthetic construct
AAEYTTGWFKI

SEQ ID NO: 45555 - protein, 10 aa, synthetic construct
AAWDSGWFKI

SEQ ID NO: 45556 - protein, 9 aa, synthetic construct
AAWEEYKKL

SEQ ID NO: 45557 - protein, 10 aa, synthetic construct
ANNTTGWFKI

SEQ ID NO: 45558 - protein, 12 aa, synthetic construct
AAWGNTTGWFKI

SEQ ID NO: 45559 - protein, 13 aa, synthetic construct
AAWGGYTTGWFKI

SEQ ID NO: 45560 - protein, 10 aa, synthetic construct
AANTTGWFKI

SEQ ID NO: 45561 - protein, 10 aa, synthetic construct
AAWENYYKKL

SEQ ID NO: 45562 - protein, 12 aa, synthetic construct
AAWDYSTGWFKI

SEQ ID NO: 45563 - protein, 12 aa, synthetic construct
AAWAPTTGWFKI

SEQ ID NO: 45564 - protein, 12 aa, synthetic construct
AAWDLPTGWFKI

SEQ ID NO: 45565 - protein, 14 aa, synthetic construct
AAWDPLYTTGWFKI

SEQ ID NO: 45566 - protein, 9 aa, synthetic construct
AAWTGWFKI

SEQ ID NO: 45567 - protein, 7 aa, synthetic construct
AAGWFKI

SEQ ID NO: 45568 - protein, 11 aa, synthetic construct
AAWDSLGWFKI

SEQ ID NO: 45569 - protein, 8 aa, synthetic construct
AACGWFKI

SEQ ID NO: 45570 - protein, 13 aa, synthetic construct
AAWDSPATGWFKI

SEQ ID NO: 45571 - protein, 11 aa, synthetic construct
AAWENTGWFKI

SEQ ID NO: 45572 - protein, 10 aa, synthetic construct
AAWDPSWFKI

SEQ ID NO: 45573 - protein, 10 aa, synthetic construct
AAWRFGWFKI

SEQ ID NO: 45574 - protein, 11 aa, synthetic construct
AAWDSGGWFKI

SEQ ID NO: 45575 - protein, 9 aa, synthetic construct
AAWDFYKKL

SEQ ID NO: 45576 - protein, 13 aa, synthetic construct
AAWDDDTTGWFKI

SEQ ID NO: 45577 - protein, 12 aa, synthetic construct
AAWDCPTGWFKI

SEQ ID NO: 45578 - protein, 10 aa, synthetic construct
AFYTTGWFKI

SEQ ID NO: 45579 - protein, 10 aa, synthetic construct
AAWFTGWFKI

SEQ ID NO: 45580 - protein, 10 aa, synthetic construct
AAWTTGWFKI

SEQ ID NO: 45581 - protein, 8 aa, synthetic construct
AAFGWFKI

SEQ ID NO: 45582 - protein, 9 aa, synthetic construct
AACTGWFKI

SEQ ID NO: 45583 - protein, 14 aa, synthetic construct
AAWDPGDTTGWFKI

SEQ ID NO: 45584 - protein, 8 aa, synthetic construct
AAWDYEKL

SEQ ID NO: 45585 - protein, 13 aa, synthetic construct
AAWDLDTTGWFKI

SEQ ID NO: 45586 - protein, 12 aa, synthetic construct
AAWDLGPGWFKI

SEQ ID NO: 45587 - protein, 13 aa, synthetic construct
AAWDWNTTGWFKI

SEQ ID NO: 45588 - protein, 12 aa, synthetic construct
AAWDCATGWFKI

SEQ ID NO: 45589 - protein, 11 aa, synthetic construct
AAGDTTGWFKI

SEQ ID NO: 45590 - protein, 11 aa, synthetic construct
AASDTTGWFKI

SEQ ID NO: 45591 - protein, 13 aa, synthetic construct
AAWDYNAAGWFKI

SEQ ID NO: 45592 - protein, 13 aa, synthetic construct
AAWDYRATGWFKI

SEQ ID NO: 45593 - protein, 12 aa, synthetic construct
AAWVNTTGWFKI

SEQ ID NO: 45594 - protein, 12 aa, synthetic construct
AAWDCRGGWFKI

SEQ ID NO: 45595 - protein, 9 aa, synthetic construct
ALTTGWFKI

SEQ ID NO: 45596 - protein, 13 aa, synthetic construct
AAWDYRPTGWFKI

SEQ ID NO: 45597 - protein, 12 aa, synthetic construct
AAWADTTGWFKI

SEQ ID NO: 45598 - protein, 13 aa, synthetic construct
AAWDSHTTGWFKI

SEQ ID NO: 45599 - protein, 13 aa, synthetic construct
AAWDSEATGWFKI

SEQ ID NO: 45600 - protein, 9 aa, synthetic construct
AAWEGWFKI

SEQ ID NO: 45601 - protein, 10 aa, synthetic construct
AAWDCGWFKI

SEQ ID NO: 45602 - protein, 12 aa, synthetic construct
AAWSYTTGWFKI

SEQ ID NO: 45603 - protein, 10 aa, synthetic construct
AASATGWFKI

SEQ ID NO: 45604 - protein, 12 aa, synthetic construct
AAWDWATGWFKI

SEQ ID NO: 45605 - protein, 11 aa, synthetic construct
AAWDYEGWFKI

SEQ ID NO: 45606 - protein, 12 aa, synthetic construct
AAWGITTGWFKI

SEQ ID NO: 45607 - skipped

SEQ ID NO: 45608 - protein, 12 aa, synthetic construct
AAWANTTGWFKI

SEQ ID NO: 45609 - protein, 13 aa, synthetic construct
AAWDQYTTGWFKI

SEQ ID NO: 45610 - protein, 13 aa, synthetic construct
AAWGTYTTGWFKI

SEQ ID NO: 45611 - protein, 11 aa, synthetic construct
AAWDYTGWFKI

SEQ ID NO: 45612 - protein, 13 aa, synthetic construct
AAWGGRGTGWFKI

SEQ ID NO: 45613 - protein, 13 aa, synthetic construct
AAWDCVPTGWFKI

SEQ ID NO: 45614 - protein, 14 aa, synthetic construct
AAWDYPFTTGWFKI

SEQ ID NO: 45615 - protein, 15 aa, synthetic construct
AAWVPEGYTTGWFKI

SEQ ID NO: 45616 - protein, 10 aa, synthetic construct
AAWSTGWFKI

SEQ ID NO: 45617 - protein, 12 aa, synthetic construct
AAWDRGSGWFKI

SEQ ID NO: 45618 - protein, 8 aa, synthetic construct
AAWDYVKL

SEQ ID NO: 45619 - protein, 12 aa, synthetic construct
AAWGLATGWFKI

SEQ ID NO: 45620 - protein, 11 aa, synthetic construct
AVGETTGWFKI

SEQ ID NO: 45621 - protein, 11 aa, synthetic construct
AAPYTTGWFKI

SEQ ID NO: 45622 - protein, 13 aa, synthetic construct
AAWDRYTTGWFKI

SEQ ID NO: 45623 - protein, 7 aa, synthetic construct
AACPFKI

SEQ ID NO: 45624 - protein, 9 aa, synthetic construct
AAWDYWFKI

SEQ ID NO: 45625 - protein, 9 aa, synthetic construct
AAWDEYKKL

SEQ ID NO: 45626 - protein, 13 aa, synthetic construct
AAWEGNTTGWFKI

SEQ ID NO: 45627 - protein, 7 aa, synthetic construct
ALGYKKL

SEQ ID NO: 45628 - protein, 11 aa, synthetic construct
AAWDHPGWFKI

SEQ ID NO: 45629 - protein, 13 aa, synthetic construct
AAWDWDTTGWFKI

SEQ ID NO: 45630 - protein, 12 aa, synthetic construct
AARLYTTGWFKI

SEQ ID NO: 45631 - protein, 14 aa, synthetic construct
AAWDSTYTTGWFKI

SEQ ID NO: 45632 - protein, 12 aa, synthetic construct
AAWDYTPGWFKI

SEQ ID NO: 45633 - protein, 9 aa, synthetic construct
QYTTGWFKI

SEQ ID NO: 45634 - protein, 13 aa, synthetic construct
AAWDSNTTGWFKI

SEQ ID NO: 45635 - protein, 12 aa, synthetic construct
AAWVYTTGWFKI

SEQ ID NO: 45636 - protein, 12 aa, synthetic construct
AAWDSTTGWFKI

SEQ ID NO: 45637 - protein, 9 aa, synthetic construct
AAWDVMEKL

SEQ ID NO: 45638 - protein, 8 aa, synthetic construct
AAWGWFKI

SEQ ID NO: 45639 - protein, 5 aa, synthetic construct
AAWDP

SEQ ID NO: 45640 - protein, 9 aa, synthetic construct
AAWEYYKKL

SEQ ID NO: 45641 - protein, 7 aa, synthetic construct
AACWFKI

SEQ ID NO: 45642 - protein, 11 aa, synthetic construct
AAWDYAGWFKI

SEQ ID NO: 45643 - protein, 8 aa, synthetic construct
AAPGWFKI

SEQ ID NO: 45644 - protein, 12 aa, synthetic construct
AAWDYRVGWFKI

SEQ ID NO: 45645 - protein, 11 aa, synthetic construct
AAWDFTGWFKI

SEQ ID NO: 45646 - protein, 11 aa, synthetic construct
AARGATGWFKI

SEQ ID NO: 45647 - protein, 8 aa, synthetic construct
AAWDRGKI

SEQ ID NO: 45648 - protein, 12 aa, synthetic construct
AAWALTTGWFKI

SEQ ID NO: 45649 - protein, 12 aa, synthetic construct
AAWDRGTGWFKI

SEQ ID NO: 45650 - protein, 11 aa, synthetic construct
AAWGPTGWFKI

SEQ ID NO: 45651 - protein, 12 aa, synthetic construct
AAWDLATGWFKI

SEQ ID NO: 45652 - protein, 12 aa, synthetic construct
AAWDYRTGWFKI

SEQ ID NO: 45653 - protein, 13 aa, synthetic construct
AAWDYGATGWFKI

SEQ ID NO: 45654 - protein, 11 aa, synthetic construct
AAWDFPGWFKI

SEQ ID NO: 45655 - protein, 15 aa, synthetic construct
AAWDPSLYTTGWFKI

SEQ ID NO: 45656 - protein, 13 aa, synthetic construct
AAWDYSTTGWFKI

SEQ ID NO: 45657 - protein, 13 aa, synthetic construct
AAWDYEVTGWFKI

SEQ ID NO: 45658 - protein, 14 aa, synthetic construct
AAWDLPHTTGWFKI

SEQ ID NO: 45659 - protein, 13 aa, synthetic construct
AAWDYDATGWFKI

SEQ ID NO: 45660 - protein, 12 aa, synthetic construct
AAWDLSTGWFKI

SEQ ID NO: 45661 - protein, 11 aa, synthetic construct
AAWDWTGWFKI

SEQ ID NO: 45662 - protein, 13 aa, synthetic construct
AAWDCGTTGWFKI

SEQ ID NO: 45663 - protein, 8 aa, synthetic construct
AAWGYKKL

SEQ ID NO: 45664 - protein, 14 aa, synthetic construct
AAWDYTYTTGWFKI

SEQ ID NO: 45665 - protein, 13 aa, synthetic construct
AAWDKGTTGWFKI

SEQ ID NO: 45666 - protein, 7 aa, synthetic construct
AAWDKKL

SEQ ID NO: 45667 - protein, 10 aa, synthetic construct
AAWITGWFKI

SEQ ID NO: 45668 - protein, 11 aa, synthetic construct
AAVYTTGWFKI

SEQ ID NO: 45669 - protein, 9 aa, synthetic construct
AAPTGWFKI

SEQ ID NO: 45670 - protein, 6 aa, synthetic construct
AAGFKI

SEQ ID NO: 45671 - protein, 13 aa, synthetic construct
AAWDFGTTGWFKI

SEQ ID NO: 45672 - protein, 9 aa, synthetic construct
AAGAEYKKL

SEQ ID NO: 45673 - protein, 11 aa, synthetic construct
AAPNTTGWFKI

SEQ ID NO: 45674 - protein, 4 aa, synthetic construct
WFKI

SEQ ID NO: 45675 - protein, 13 aa, synthetic construct
AAWDYFTTGWFKI

SEQ ID NO: 45676 - protein, 13 aa, synthetic construct
AAWDRRTTGWFKI

SEQ ID NO: 45677 - protein, 11 aa, synthetic construct
AAWWTTGWFKI

SEQ ID NO: 45678 - protein, 12 aa, synthetic construct
AAWVSTTGWFKI

SEQ ID NO: 45679 - protein, 9 aa, synthetic construct
AAWDSWFKI

SEQ ID NO: 45680 - protein, 13 aa, synthetic construct
AAWALYTTGWFKI

SEQ ID NO: 45681 - protein, 13 aa, synthetic construct
AAWDYYTTGWFKI

SEQ ID NO: 45682 - protein, 11 aa, synthetic construct
AAWDFPSNKKL

SEQ ID NO: 45683 - protein, 12 aa, synthetic construct
AAWDGATGWFKI

SEQ ID NO: 45684 - protein, 14 aa, synthetic construct
AAWDAGATTGWFKI

SEQ ID NO: 45685 - protein, 12 aa, synthetic construct
AASIDTTGWFKI

SEQ ID NO: 45686 - protein, 14 aa, synthetic construct
AAWDSGGNTGWFKI

SEQ ID NO: 45687 - protein, 8 aa, synthetic construct
AAWADKKL

SEQ ID NO: 45688 - protein, 11 aa, synthetic construct
AAWDTTGWFRI

SEQ ID NO: 45689 - protein, 10 aa, synthetic construct
AGNTTGWFKI

SEQ ID NO: 45690 - protein, 9 aa, synthetic construct
AAWVGWFKI

SEQ ID NO: 45691 - protein, 9 aa, synthetic construct
AAWDYSKKL

SEQ ID NO: 45692 - protein, 15 aa, synthetic construct
AAWERKGYTTGWFKI

SEQ ID NO: 45693 - protein, 9 aa, synthetic construct
AAWAYYKKL

SEQ ID NO: 45694 - protein, 9 aa, synthetic construct
AAWDFWFKI

SEQ ID NO: 45695 - protein, 13 aa, synthetic construct
AAWDLYTTGWFKI

SEQ ID NO: 45696 - protein, 11 aa, synthetic construct
AAWDFRYYKKL

SEQ ID NO: 45697 - protein, 14 aa, synthetic construct
AAWDSKYTTGWFKI

SEQ ID NO: 45698 - protein, 13 aa, synthetic construct
AAWDWRATGWFKI

SEQ ID NO: 45699 - protein, 14 aa, synthetic construct
AAWDYPGTTGWFKI

SEQ ID NO: 45700 - protein, 9 aa, synthetic construct
AAWDGWFKI

SEQ ID NO: 45701 - protein, 13 aa, synthetic construct
AAWDFHTTGWFKI

SEQ ID NO: 45702 - protein, 13 aa, synthetic construct
AAWGHYTTGWFKI

SEQ ID NO: 45703 - protein, 14 aa, synthetic construct
AAWDTDGTTGWFKI

SEQ ID NO: 45704 - protein, 10 aa, synthetic construct
AAFTTGWFKI

SEQ ID NO: 45705 - protein, 14 aa, synthetic construct
AAWDSGYTTGWFKI

SEQ ID NO: 45706 - protein, 13 aa, synthetic construct
AAWDEETTGWFKI

SEQ ID NO: 45707 - protein, 9 aa, synthetic construct
AAWPYYKKL

SEQ ID NO: 45708 - protein, 11 aa, synthetic construct
AAWDSNYYKKL

SEQ ID NO: 45709 - protein, 13 aa, synthetic construct
AAWDPTGTGWFKI

SEQ ID NO: 45710 - protein, 13 aa, synthetic construct
AAWDSRTTGWFKI

SEQ ID NO: 45711 - protein, 8 aa, synthetic construct
AAWDLGKI

SEQ ID NO: 45712 - protein, 10 aa, synthetic construct
AAWDSYYKKL

SEQ ID NO: 45713 - protein, 11 aa, synthetic construct
AAWDTTGWFEI

SEQ ID NO: 45714 - protein, 7 aa, synthetic construct
AAGREKL

SEQ ID NO: 45715 - protein, 10 aa, synthetic construct
AAWDLGYKKL

SEQ ID NO: 45716 - protein, 12 aa, synthetic construct
AAWDYRIGWFKI

SEQ ID NO: 45717 - protein, 10 aa, synthetic construct
AAWGPGWFKI

SEQ ID NO: 45718 - protein, 13 aa, synthetic construct
AAWRGNTTGWFKI

SEQ ID NO: 45719 - protein, 11 aa, synthetic construct
AAWAYTGWFKI

SEQ ID NO: 45720 - protein, 14 aa, synthetic construct
AAWDLGNTTGWFKI

SEQ ID NO: 45721 - protein, 13 aa, synthetic construct
AAWGGDTTGWFKI

SEQ ID NO: 45722 - protein, 9 aa, synthetic construct
AAWGPYKKL

SEQ ID NO: 45723 - protein, 12 aa, synthetic construct
AAWDVGTGWFKI

SEQ ID NO: 45724 - protein, 10 aa, synthetic construct
AAWDYDYKKL

SEQ ID NO: 45725 - protein, 12 aa, synthetic construct
AAWDPTTGWFKI

SEQ ID NO: 45726 - protein, 12 aa, synthetic construct
AAWDYGTGWFKI

SEQ ID NO: 45727 - protein, 9 aa, synthetic construct
AAWENYKKL

SEQ ID NO: 45728 - protein, 10 aa, synthetic construct
AAWGNYYKKL

SEQ ID NO: 45729 - protein, 14 aa, synthetic construct
AAWDLEDTTGWFKI

SEQ ID NO: 45730 - protein, 13 aa, synthetic construct
AAWDYRGTGWFKI

SEQ ID NO: 45731 - protein, 10 aa, synthetic construct
AAWDWDYKKL

SEQ ID NO: 45732 - protein, 14 aa, synthetic construct
AAWDYWLATGWFKI

SEQ ID NO: 45733 - protein, 8 aa, synthetic construct
AATGWFKI

SEQ ID NO: 45734 - protein, 14 aa, synthetic construct
AAWDERDTTGWFKI

SEQ ID NO: 45735 - protein, 14 aa, synthetic construct
AAWDLGIATGWFKI

SEQ ID NO: 45736 - protein, 11 aa, synthetic construct
AAWDTTGWLKI

SEQ ID NO: 45737 - protein, 14 aa, synthetic construct
AAWDYGPSTGWFKI

SEQ ID NO: 45738 - protein, 8 aa, synthetic construct
AAWVPFKI

SEQ ID NO: 45739 - protein, 10 aa, synthetic construct
AAWDLVYKKL

SEQ ID NO: 45740 - protein, 9 aa, synthetic construct
AAWEVYKKL

SEQ ID NO: 45741 - protein, 13 aa, synthetic construct
AAWEGYTTGWFKI

SEQ ID NO: 45742 - protein, 5 aa, synthetic construct
GWFKI

SEQ ID NO: 45743 - protein, 11 aa, synthetic construct
AAWDYDYYKKL

SEQ ID NO: 45744 - protein, 9 aa, synthetic construct
AAWDRYKKL

SEQ ID NO: 45745 - protein, 12 aa, synthetic construct
AAWGYTTGWLKI

SEQ ID NO: 45746 - protein, 12 aa, synthetic construct
AAWVGGTGWFKI

SEQ ID NO: 45747 - protein, 11 aa, synthetic construct
AAWDNTGWFKI

SEQ ID NO: 45748 - protein, 12 aa, synthetic construct
AARAYTTGWFKI

SEQ ID NO: 45749 - protein, 12 aa, synthetic construct
AAWDYTTGWLKI

SEQ ID NO: 45750 - protein, 13 aa, synthetic construct
AAGVSGSTGWFKI

SEQ ID NO: 45751 - protein, 14 aa, synthetic construct
AAWDYWYTTGWFKI

SEQ ID NO: 45752 - protein, 12 aa, synthetic construct
AAGGYTTGWFKI

SEQ ID NO: 45753 - protein, 11 aa, synthetic construct
AAWDTPGWFKI

SEQ ID NO: 45754 - protein, 9 aa, synthetic construct
AAWGRYKKL

SEQ ID NO: 45755 - protein, 10 aa, synthetic construct
AAWDMGYKKL

SEQ ID NO: 45756 - protein, 9 aa, synthetic construct
AAWDSYKKL

SEQ ID NO: 45757 - protein, 10 aa, synthetic construct
AAWAHYYKKL

SEQ ID NO: 45758 - protein, 13 aa, synthetic construct
AAWDYNTTGWFKI

SEQ ID NO: 45759 - protein, 10 aa, synthetic construct
AAWVHYYKKL

SEQ ID NO: 45760 - protein, 9 aa, synthetic construct
AAWIGWFKI

SEQ ID NO: 45761 - protein, 11 aa, synthetic construct
AAWDSPYYKKL

SEQ ID NO: 45762 - protein, 13 aa, synthetic construct
AAWDSGTTGWFKI

SEQ ID NO: 45763 - protein, 10 aa, synthetic construct
LRGIPLVGSR

SEQ ID NO: 45764 - protein, 10 aa, synthetic construct
AAWGGYYKKL

SEQ ID NO: 45765 - protein, 11 aa, synthetic construct
AAWDPDYYKKL

SEQ ID NO: 45766 - protein, 11 aa, synthetic construct
AAWGLLYYKKL

SEQ ID NO: 45767 - protein, 8 aa, synthetic construct
AAWDSKKL

SEQ ID NO: 45768 - protein, 13 aa, synthetic construct
AAGDPYTTGWFKI

SEQ ID NO: 45769 - protein, 12 aa, synthetic construct
AAWDYNTGWFKI

SEQ ID NO: 45770 - protein, 12 aa, synthetic construct
AAWGYNTGWFKI

SEQ ID NO: 45771 - protein, 11 aa, synthetic construct
AAWDTTGLFKI

SEQ ID NO: 45772 - protein, 8 aa, synthetic construct
AAWDYKKL

SEQ ID NO: 45773 - protein, 12 aa, synthetic construct
AAWDNTTAWFKI

SEQ ID NO: 45774 - protein, 10 aa, synthetic construct
AAWGTGWLKI

SEQ ID NO: 45775 - protein, 12 aa, synthetic construct
AAWDWTTGWLKI

SEQ ID NO: 45776 - protein, 11 aa, synthetic construct
AAWDATGWLKI

SEQ ID NO: 45777 - protein, 13 aa, synthetic construct
AAWDEETTSWFKI

SEQ ID NO: 45778 - protein, 11 aa, synthetic construct
AALDTTGWFKI

SEQ ID NO: 45779 - protein, 10 aa, synthetic construct
LRGITLVGSR

SEQ ID NO: 45780 - protein, 9 aa, synthetic construct
AAWGGWLKI

SEQ ID NO: 45781 - protein, 12 aa, synthetic construct
AAGDLGTGWFKI

SEQ ID NO: 45782 - protein, 10 aa, synthetic construct
AAWDTGWLKI

SEQ ID NO: 45783 - protein, 11 aa, synthetic construct
AAWDTTGWSKI

SEQ ID NO: 45784 - protein, 12 aa, synthetic construct
AAWEYTTGWLKI

SEQ ID NO: 45785 - protein, 12 aa, synthetic construct
AAWDYTTGWFEI

SEQ ID NO: 45786 - protein, 12 aa, synthetic construct
AAWDDTTGWLKI

SEQ ID NO: 45787 - protein, 12 aa, synthetic construct
AAWAHTTGWFNI

SEQ ID NO: 45788 - protein, 12 aa, synthetic construct
AAWGDTTGWLKI

SEQ ID NO: 45789 - protein, 12 aa, synthetic construct
AAWGYTTGWFRI

SEQ ID NO: 45790 - protein, 12 aa, synthetic construct
AAWDYTTGWSKI

SEQ ID NO: 45791 - protein, 11 aa, synthetic construct
AAWDATGWFRI

SEQ ID NO: 45792 - protein, 11 aa, synthetic construct
AAWDTTCWFKI

SEQ ID NO: 45793 - protein, 11 aa, synthetic construct
AAWGTTGWLKI

SEQ ID NO: 45794 - protein, 12 aa, synthetic construct
AAWAYTTGWSKI

SEQ ID NO: 45795 - protein, 11 aa, synthetic construct
AAWAVNYYKKL

SEQ ID NO: 45796 - protein, 10 aa, synthetic construct
AAWVTGWLKI

SEQ ID NO: 45797 - protein, 12 aa, synthetic construct
AAWDLGTGWFEI

SEQ ID NO: 45798 - protein, 12 aa, synthetic construct
AAWDFATGWFEI

SEQ ID NO: 45799 - protein, 12 aa, synthetic construct
AAWDLGTGWLKI

SEQ ID NO: 45800 - protein, 11 aa, synthetic construct
AAWDTTGWFKV

SEQ ID NO: 45801 - protein, 12 aa, synthetic construct
AAGDWTTGWFKI

SEQ ID NO: 45802 - protein, 12 aa, synthetic construct
AAGDYTTGWFKI

SEQ ID NO: 45803 - protein, 11 aa, synthetic construct
AAWDPTGWLKI

SEQ ID NO: 45804 - protein, 11 aa, synthetic construct
AAWDTTGRFKI

SEQ ID NO: 45805 - protein, 11 aa, synthetic construct
LRGIIPLVGSR

SEQ ID NO: 45806 - protein, 11 aa, synthetic construct
AVWDTTGWFKI

SEQ ID NO: 45807 - protein, 12 aa, synthetic construct
AAWAYTTGWLKI

SEQ ID NO: 45808 - protein, 14 aa, synthetic construct
AAWDPRYTTGWFKI

SEQ ID NO: 45809 - protein, 10 aa, synthetic construct
AAWGTGWFKM

SEQ ID NO: 45810 - protein, 11 aa, synthetic construct
AAWGTPGWFKI

SEQ ID NO: 45811 - protein, 12 aa, synthetic construct
AAWDPLNYYKKL

SEQ ID NO: 45812 - protein, 11 aa, synthetic construct
AAWDTNGWFKI

SEQ ID NO: 45813 - protein, 12 aa, synthetic construct
AAWAYPTGWFKI

SEQ ID NO: 45814 - protein, 10 aa, synthetic construct
AAWATGWFKI

SEQ ID NO: 45815 - protein, 11 aa, synthetic construct
AACDTTGWFKI

SEQ ID NO: 45816 - protein, 10 aa, synthetic construct
AAWGYYYKKL

SEQ ID NO: 45817 - protein, 12 aa, synthetic construct
AAGDHTTGWFKI

SEQ ID NO: 45818 - protein, 11 aa, synthetic construct
AAWDTTGWFKM

SEQ ID NO: 45819 - protein, 10 aa, synthetic construct
AAWGTGWFQI

SEQ ID NO: 45820 - protein, 11 aa, synthetic construct
AAWDSPGWLKI

SEQ ID NO: 45821 - protein, 11 aa, synthetic construct
AARDTTGWFKI

SEQ ID NO: 45822 - protein, 12 aa, synthetic construct
AAWGYTPGWFKI

SEQ ID NO: 45823 - protein, 12 aa, synthetic construct
AAWGYTTGWFEI

SEQ ID NO: 45824 - protein, 13 aa, synthetic construct
AAWDPYNTGWFKI

SEQ ID NO: 45825 - protein, 12 aa, synthetic construct
AAWDYTTGWFKM

SEQ ID NO: 45826 - protein, 12 aa, synthetic construct
AAWENTTGWLKI

SEQ ID NO: 45827 - protein, 12 aa, synthetic construct
AAGGGTTGWFKI

SEQ ID NO: 45828 - protein, 12 aa, synthetic construct
AAWENNTGWFKI

SEQ ID NO: 45829 - protein, 11 aa, synthetic construct
AAWDCSGWFKI

SEQ ID NO: 45830 - protein, 15 aa, synthetic construct
AAWGPSLYTTGWFKI

SEQ ID NO: 45831 - protein, 11 aa, synthetic construct
AAWDSTGWLKI

SEQ ID NO: 45832 - protein, 10 aa, synthetic construct
ATWGTGWFKI

SEQ ID NO: 45833 - protein, 13 aa, synthetic construct
AAWDLGTTGWFKI

SEQ ID NO: 45834 - protein, 10 aa, synthetic construct
AAGGTGWFKI

SEQ ID NO: 45835 - protein, 11 aa, synthetic construct
AAWVFTGWFKI

SEQ ID NO: 45836 - protein, 11 aa, synthetic construct
AAWDPPGWFKI

SEQ ID NO: 45837 - protein, 12 aa, synthetic construct
AACDYTTGWFKI

SEQ ID NO: 45838 - protein, 11 aa, synthetic construct
AAWKGTGWFKI

SEQ ID NO: 45839 - protein, 12 aa, synthetic construct
AAWDYTTGWFNI

SEQ ID NO: 45840 - protein, 12 aa, synthetic construct
AALDYTTGWFKI

SEQ ID NO: 45841 - protein, 12 aa, synthetic construct
AAWDSAPGWFKI

SEQ ID NO: 45842 - protein, 11 aa, synthetic construct
AAWDAPGWFKI

SEQ ID NO: 45843 - protein, 12 aa, synthetic construct
AAGAYTTGWFKI

SEQ ID NO: 45844 - protein, 12 aa, synthetic construct
AAWDWTTGWFKV

SEQ ID NO: 45845 - protein, 10 aa, synthetic construct
AAWESYYKKL

SEQ ID NO: 45846 - protein, 7 aa, synthetic construct
AAGWLKI

SEQ ID NO: 45847 - protein, 12 aa, synthetic construct
AAWDYTTGWFRI

SEQ ID NO: 45848 - protein, 11 aa, synthetic construct
LRGIGPLVGSR

SEQ ID NO: 45849 - protein, 11 aa, synthetic construct
AAWANTGWFKI

SEQ ID NO: 45850 - protein, 8 aa, synthetic construct
AAWGYKRL

SEQ ID NO: 45851 - protein, 10 aa, synthetic construct
AAWDFGWLKI

SEQ ID NO: 45852 - protein, 7 aa, synthetic construct
AAWDKKH

SEQ ID NO: 45853 - protein, 14 aa, synthetic construct
AAWDSQYTTGWFKI

SEQ ID NO: 45854 - protein, 11 aa, synthetic construct
AAWGTTGWVKI

SEQ ID NO: 45855 - protein, 12 aa, synthetic construct
AAGDFATGWFKI

SEQ ID NO: 45856 - protein, 9 aa, synthetic construct
LRGRLVGSR

SEQ ID NO: 45857 - protein, 12 aa, synthetic construct
AALGYTTGWFKI

SEQ ID NO: 45858 - protein, 12 aa, synthetic construct
AAWDYPTGWLKI

SEQ ID NO: 45859 - protein, 10 aa, synthetic construct
AADTTGWSKI

SEQ ID NO: 45860 - protein, 11 aa, synthetic construct
AAGGTTGWFKI

SEQ ID NO: 45861 - protein, 12 aa, synthetic construct
AAWEYTTGWFNI

SEQ ID NO: 45862 - protein, 11 aa, synthetic construct
AAWHTTGWLKI

SEQ ID NO: 45863 - protein, 10 aa, synthetic construct
AAWGTGWFRI

SEQ ID NO: 45864 - protein, 12 aa, synthetic construct
AAWDCTTGWLKI

SEQ ID NO: 45865 - protein, 12 aa, synthetic construct
AAWAYTTGWFNI

SEQ ID NO: 45866 - protein, 12 aa, synthetic construct
AAWDYTTGRFKI

SEQ ID NO: 45867 - protein, 12 aa, synthetic construct
AARDYTTGWFKI

SEQ ID NO: 45868 - protein, 11 aa, synthetic construct
AAWDYPGWFKI

SEQ ID NO: 45869 - protein, 10 aa, synthetic construct
AAWGGGWFKI

SEQ ID NO: 45870 - protein, 13 aa, synthetic construct
AAWDSYNTGWFKI

SEQ ID NO: 45871 - protein, 12 aa, synthetic construct
AARENTTGWFKI

SEQ ID NO: 45872 - protein, 12 aa, synthetic construct
AAWDHTTGWLKI

SEQ ID NO: 45873 - protein, 12 aa, synthetic construct
TAWGYTTGWFKI

SEQ ID NO: 45874 - protein, 12 aa, synthetic construct
AAWAHTTGWLKI

SEQ ID NO: 45875 - protein, 11 aa, synthetic construct
AAWGTTGWSKI

SEQ ID NO: 45876 - protein, 13 aa, synthetic construct
AAWGFGTTGWFKI

SEQ ID NO: 45877 - protein, 11 aa, synthetic construct
AAPYTTGWLKI

SEQ ID NO: 45878 - protein, 13 aa, synthetic construct
AAWDFRTTGWFKI

SEQ ID NO: 45879 - protein, 12 aa, synthetic construct
AAWGNNTGWFKI

SEQ ID NO: 45880 - protein, 12 aa, synthetic construct
AAWDHATGWFKI

SEQ ID NO: 45881 - protein, 11 aa, synthetic construct
AAWEATGWLKI

SEQ ID NO: 45882 - protein, 12 aa, synthetic construct
AAWDHNTGWFKI

SEQ ID NO: 45883 - protein, 14 aa, synthetic construct
AAWDYGPSTGWLKI

SEQ ID NO: 45884 - protein, 13 aa, synthetic construct
AAWGLYTTGWFKI

SEQ ID NO: 45885 - protein, 12 aa, synthetic construct
AAWDYITGWLKI

SEQ ID NO: 45886 - protein, 12 aa, synthetic construct
TAWDPTTGWFKI

SEQ ID NO: 45887 - protein, 12 aa, synthetic construct
AAWGYATGWFKI

SEQ ID NO: 45888 - protein, 13 aa, synthetic construct
AAWDSDATGWFKI

SEQ ID NO: 45889 - protein, 12 aa, synthetic construct
AAWEYATGWFKI

SEQ ID NO: 45890 - protein, 13 aa, synthetic construct
AAWSPRATGWFKI

SEQ ID NO: 45891 - protein, 12 aa, synthetic construct
AAWDWTPGWFKI

SEQ ID NO: 45892 - protein, 10 aa, synthetic construct
AAGDGGWFKI

SEQ ID NO: 45893 - protein, 12 aa, synthetic construct
AAWVDTTGWFKI

SEQ ID NO: 45894 - protein, 13 aa, synthetic construct
AAWGPYTTGWFKI

SEQ ID NO: 45895 - protein, 12 aa, synthetic construct
AARLYTTGWLKI

SEQ ID NO: 45896 - protein, 12 aa, synthetic construct
AAWEYNTGWLKI

SEQ ID NO: 45897 - protein, 7 aa, synthetic construct
AARDKKL

SEQ ID NO: 45898 - protein, 9 aa, synthetic construct
AACTGWLKI

SEQ ID NO: 45899 - protein, 14 aa, synthetic construct
AAWDYGPYTGWFKI

SEQ ID NO: 45900 - protein, 11 aa, synthetic construct
AARGAPGWFKI

SEQ ID NO: 45901 - protein, 9 aa, synthetic construct
AAWGPDKKL

SEQ ID NO: 45902 - protein, 12 aa, synthetic construct
AARDLGTGWFKI

SEQ ID NO: 45903 - protein, 12 aa, synthetic construct
AAWGDTTGWFQI

SEQ ID NO: 45904 - protein, 12 aa, synthetic construct
AACDYPTGWFKI

SEQ ID NO: 45905 - protein, 11 aa, synthetic construct
AAWYNTGWFKI

SEQ ID NO: 45906 - protein, 12 aa, synthetic construct
AAGDCTTGWFKI

SEQ ID NO: 45907 - protein, 12 aa, synthetic construct
AAWDSTTGRFKI

SEQ ID NO: 45908 - protein, 12 aa, synthetic construct
AAWAYTTGRFKI

SEQ ID NO: 45909 - protein, 9 aa, synthetic construct
AAGGGWFKI

SEQ ID NO: 45910 - protein, 13 aa, synthetic construct
AAGGGYTTGWFKI

SEQ ID NO: 45911 - protein, 12 aa, synthetic construct
AAGGHTTGWFKI

SEQ ID NO: 45912 - protein, 12 aa, synthetic construct
AAGGITTGWFKI

SEQ ID NO: 45913 - protein, 10 aa, synthetic construct
LRGGPLVGSR

SEQ ID NO: 45914 - protein, 12 aa, synthetic construct
AAGGVTTGWFKI

SEQ ID NO: 45915 - protein, 8 aa, synthetic construct
AAGGWFKI

SEQ ID NO: 45916 - protein, 11 aa, synthetic construct
AAWEAPGWFKI

SEQ ID NO: 45917 - protein, 12 aa, synthetic construct
AAWGGTTGWLKI

SEQ ID NO: 45918 - protein, 10 aa, synthetic construct
AAWGTGWFNI

SEQ ID NO: 45919 - protein, 12 aa, synthetic construct
AAWESATGWFKI

SEQ ID NO: 45920 - protein, 11 aa, synthetic construct
AAWYTTGWLKI

SEQ ID NO: 45921 - protein, 11 aa, synthetic construct
AAWYTTGWFKV

SEQ ID NO: 45922 - protein, 11 aa, synthetic construct
AAWDTTGWFNI

SEQ ID NO: 45923 - protein, 11 aa, synthetic construct
AAWAYTGWFEI

SEQ ID NO: 45924 - protein, 12 aa, synthetic construct
AAWDLPTGWFRI

SEQ ID NO: 45925 - protein, 12 aa, synthetic construct
AAWGYTTGWFKM

SEQ ID NO: 45926 - protein, 11 aa, synthetic construct
AAGDSTGWFKI

SEQ ID NO: 45927 - protein, 11 aa, synthetic construct
AAWDNTGWLKI

SEQ ID NO: 45928 - protein, 12 aa, synthetic construct
AAWGYTSGWFKI

SEQ ID NO: 45929 - protein, 12 aa, synthetic construct
AAWGYTTGLFKI

SEQ ID NO: 45930 - protein, 13 aa, synthetic construct
AAWDSYTTGWLKI

SEQ ID NO: 45931 - protein, 11 aa, synthetic construct
AAWDTSGWFKI

SEQ ID NO: 45932 - protein, 12 aa, synthetic construct
AAWGYTNGWFKI

SEQ ID NO: 45933 - protein, 12 aa, synthetic construct
AAWGYTAGWFKI

SEQ ID NO: 45934 - protein, 10 aa, synthetic construct
TAWGTGWFKI

SEQ ID NO: 45935 - protein, 12 aa, synthetic construct
AAWGYTTGWFKV

SEQ ID NO: 45936 - protein, 12 aa, synthetic construct
AAGDYRTGWFKI

SEQ ID NO: 45937 - protein, 12 aa, synthetic construct
AAWDYTTGWFKV

SEQ ID NO: 45938 - protein, 12 aa, synthetic construct
AAWDLTTGWFKI

SEQ ID NO: 45939 - protein, 12 aa, synthetic construct
AAWGYTTGWSKI

SEQ ID NO: 45940 - protein, 10 aa, synthetic construct
AAWGTGWFEI

SEQ ID NO: 45941 - protein, 11 aa, synthetic construct
AAWDTTGWVKI

SEQ ID NO: 45942 - protein, 11 aa, synthetic construct
AAGDPTGWFKI

SEQ ID NO: 45943 - protein, 12 aa, synthetic construct
AAWDWGPGWFKI

SEQ ID NO: 45944 - protein, 11 aa, synthetic construct
AAWGTAGWFKI

SEQ ID NO: 45945 - protein, 11 aa, synthetic construct
AAWYTPGWFKI

SEQ ID NO: 45946 - protein, 10 aa, synthetic construct
AAWGTGLFKI

SEQ ID NO: 45947 - protein, 12 aa, synthetic construct
AAWGGGTGWFKI

SEQ ID NO: 45948 - protein, 11 aa, synthetic construct
AAWETPGWFKI

SEQ ID NO: 45949 - protein, 12 aa, synthetic construct
AAWDSSTGWFKI

SEQ ID NO: 45950 - protein, 14 aa, synthetic construct
AAWDWGIYTGWFKI

SEQ ID NO: 45951 - protein, 12 aa, synthetic construct
AAWGITTGWFKM

SEQ ID NO: 45952 - protein, 13 aa, synthetic construct
ASWDPYTTGWFKI

SEQ ID NO: 45953 - protein, 12 aa, synthetic construct
AAWARGSGWFKI

SEQ ID NO: 45954 - protein, 12 aa, synthetic construct
AAGAHTTGWFKI

SEQ ID NO: 45955 - protein, 12 aa, synthetic construct
AAWDEATGWFKI

SEQ ID NO: 45956 - protein, 12 aa, synthetic construct
TAWDYTTGWFKI

SEQ ID NO: 45957 - protein, 12 aa, synthetic construct
AAWVNTTGWFEI

SEQ ID NO: 45958 - protein, 11 aa, synthetic construct
AAWDTTGWFKK

SEQ ID NO: 45959 - protein, 11 aa, synthetic construct
ASWDTTGWFKI

SEQ ID NO: 45960 - protein, 11 aa, synthetic construct
AAWDPTGRFKI

SEQ ID NO: 45961 - protein, 11 aa, synthetic construct
AAWDTTGWFKL

SEQ ID NO: 45962 - protein, 13 aa, synthetic construct
AAWDSPAPGWFKI

SEQ ID NO: 45963 - protein, 11 aa, synthetic construct
AAWDTTGWFKT

SEQ ID NO: 45964 - protein, 12 aa, synthetic construct
AAWAYTAGWFKI

SEQ ID NO: 45965 - protein, 12 aa, synthetic construct
AAGDDTTGWFKI

SEQ ID NO: 45966 - protein, 12 aa, synthetic construct
AAWDWGAGWFKI

SEQ ID NO: 45967 - protein, 15 aa, synthetic construct
AAWAPSLYTTGWFKI

SEQ ID NO: 45968 - protein, 12 aa, synthetic construct
ATWDYPTGWFKI

SEQ ID NO: 45969 - protein, 12 aa, synthetic construct
AAWAYTIGWFKI

SEQ ID NO: 45970 - protein, 12 aa, synthetic construct
AAWADTTGWLKI

SEQ ID NO: 45971 - protein, 11 aa, synthetic construct
AAWYSTGWFKI

SEQ ID NO: 45972 - protein, 10 aa, synthetic construct
AAWGPGWVKI

SEQ ID NO: 45973 - protein, 12 aa, synthetic construct
AAWAWGTGWFKI

SEQ ID NO: 45974 - protein, 15 aa, synthetic construct
AAWVHEGYTTGWFKI

SEQ ID NO: 45975 - protein, 14 aa, synthetic construct
AAWGLPHTTGWFKI

SEQ ID NO: 45976 - protein, 11 aa, synthetic construct
AAWATPGWFKI

SEQ ID NO: 45977 - protein, 11 aa, synthetic construct
AAWATAGWFKI

SEQ ID NO: 45978 - protein, 12 aa, synthetic construct
SAWGYTTGWFKI

SEQ ID NO: 45979 - protein, 8 aa, synthetic construct
AAWDWLKI

SEQ ID NO: 45980 - protein, 11 aa, synthetic construct
AAWDTAGWFKI

SEQ ID NO: 45981 - protein, 13 aa, synthetic construct
AARDSGTTGWFKI

SEQ ID NO: 45982 - protein, 13 aa, synthetic construct
AAWASYTTGWFKI

SEQ ID NO: 45983 - protein, 9 aa, synthetic construct
AAWEEYKKH

SEQ ID NO: 45984 - protein, 13 aa, synthetic construct
AAWAWRATGWFKI

SEQ ID NO: 45985 - protein, 12 aa, synthetic construct
AAWARTTGWFEI

SEQ ID NO: 45986 - protein, 11 aa, synthetic construct
AGGETTGWFKI

SEQ ID NO: 45987 - protein, 13 aa, synthetic construct
AAWDSYTTGWSKI

SEQ ID NO: 45988 - protein, 11 aa, synthetic construct
AAWDYEGWLKI

SEQ ID NO: 45989 - protein, 11 aa, synthetic construct
AAWDSPGWFKV

SEQ ID NO: 45990 - protein, 13 aa, synthetic construct
TAWGGYTTGWFKI

SEQ ID NO: 45991 - protein, 13 aa, synthetic construct
AAWGGYTTGWFNI

SEQ ID NO: 45992 - protein, 8 aa, synthetic construct
AAWADKEL

SEQ ID NO: 45993 - protein, 12 aa, synthetic construct
AAWDCATGWLKI

SEQ ID NO: 45994 - protein, 12 aa, synthetic construct
AAWAYNTGWFKI

SEQ ID NO: 45995 - protein, 11 aa, synthetic construct
ATWDTTGWFKI

SEQ ID NO: 45996 - protein, 11 aa, synthetic construct
AAGDCAGWFKI

SEQ ID NO: 45997 - protein, 11 aa, synthetic construct
AAWDPTGLFKI

SEQ ID NO: 45998 - protein, 12 aa, synthetic construct
AAGDFTTGWFKI

SEQ ID NO: 45999 - protein, 9 aa, synthetic construct
AAWGDYKKL

SEQ ID NO: 46000 - protein, 11 aa, synthetic construct
AAFYTTGWFKI

SEQ ID NO: 46001 - protein, 12 aa, synthetic construct
AAWGNTTGWLKI

SEQ ID NO: 46002 - protein, 10 aa, synthetic construct
AAWVTGRFKI

SEQ ID NO: 46003 - protein, 12 aa, synthetic construct
AAWDWTTGWSKI

SEQ ID NO: 46004 - protein, 12 aa, synthetic construct
AAWGDTTGWFEI

SEQ ID NO: 46005 - protein, 13 aa, synthetic construct
AAWGGNTTGWFKI

SEQ ID NO: 46006 - protein, 10 aa, synthetic construct
AAWVTGWFRI

SEQ ID NO: 46007 - protein, 11 aa, synthetic construct
AAWDCTGWFKV

SEQ ID NO: 46008 - protein, 11 aa, synthetic construct
AAWDATGLFKI

SEQ ID NO: 46009 - protein, 12 aa, synthetic construct
AAWDVGPGWFKI

SEQ ID NO: 46010 - protein, 12 aa, synthetic construct
AAWALGTGWFKI

SEQ ID NO: 46011 - protein, 13 aa, synthetic construct
AAWDYDTTGWFKI

SEQ ID NO: 46012 - protein, 12 aa, synthetic construct
AAWALGPGWFKI

SEQ ID NO: 46013 - protein, 11 aa, synthetic construct
SAWDPTGWFKI

SEQ ID NO: 46014 - protein, 11 aa, synthetic construct
AAWDWTGWLKI

SEQ ID NO: 46015 - protein, 9 aa, synthetic construct
AAWEEYNKL

SEQ ID NO: 46016 - protein, 10 aa, synthetic construct
AAGDFGWFKI

SEQ ID NO: 46017 - protein, 12 aa, synthetic construct
AAWDVTTGWFKI

SEQ ID NO: 46018 - protein, 8 aa, synthetic construct
AATGWVKI

SEQ ID NO: 46019 - protein, 11 aa, synthetic construct
AAWYTTGWFNI

SEQ ID NO: 46020 - protein, 8 aa, synthetic construct
AARDRGKI

SEQ ID NO: 46021 - protein, 12 aa, synthetic construct
AAWGGTPGWFKI

SEQ ID NO: 46022 - protein, 9 aa, synthetic construct
AAWVRWFKL

SEQ ID NO: 46023 - protein, 11 aa, synthetic construct
AAWDYAGRFKI

SEQ ID NO: 46024 - protein, 9 aa, synthetic construct
ALTPGWFKI

SEQ ID NO: 46025 - protein, 11 aa, synthetic construct
AAGDCSGWFKI

SEQ ID NO: 46026 - protein, 12 aa, synthetic construct
AAWGDTTGWSKI

SEQ ID NO: 46027 - protein, 11 aa, synthetic construct
AAWDTTGWFTI

SEQ ID NO: 46028 - protein, 10 aa, synthetic construct
AAWGNYYNKL

SEQ ID NO: 46029 - protein, 14 aa, synthetic construct
ATWDPLYTTGWFKI

SEQ ID NO: 46030 - protein, 10 aa, synthetic construct
AARGTGWFKI

SEQ ID NO: 46031 - protein, 9 aa, synthetic construct
AAWAEYKKL

SEQ ID NO: 46032 - protein, 12 aa, synthetic construct
AAWAYTTGWFEI

SEQ ID NO: 46033 - protein, 12 aa, synthetic construct
AARGYTTGWFKI

SEQ ID NO: 46034 - protein, 13 aa, synthetic construct
AAWDWRATGWFEI

SEQ ID NO: 46035 - protein, 9 aa, synthetic construct
AAWEDYKKL

SEQ ID NO: 46036 - protein, 12 aa, synthetic construct
AAWDDNTGWFKI

SEQ ID NO: 46037 - protein, 13 aa, synthetic construct
AAWAFGTTGWFKI

SEQ ID NO: 46038 - protein, 14 aa, synthetic construct
AAWDSKYTTGWFNI

SEQ ID NO: 46039 - protein, 7 aa, synthetic construct
ALGYKEL

SEQ ID NO: 46040 - protein, 7 aa, synthetic construct
ALGYKKH

SEQ ID NO: 46041 - protein, 12 aa, synthetic construct
AAWGVATGWFKI

SEQ ID NO: 46042 - protein, 10 aa, synthetic construct
AAWAFGWFKI

SEQ ID NO: 46043 - protein, 12 aa, synthetic construct
AAWDWGTGWFKT

SEQ ID NO: 46044 - protein, 11 aa, synthetic construct
AAWDTTGWYKI

SEQ ID NO: 46045 - protein, 14 aa, synthetic construct
AAWDSKYTTGWLKI

SEQ ID NO: 46046 - protein, 12 aa, synthetic construct
AAWGCTTGWFKI

SEQ ID NO: 46047 - protein, 11 aa, synthetic construct
AAWYTTCWFKI

SEQ ID NO: 46048 - protein, 11 aa, synthetic construct
AAWGTTGLFKI

SEQ ID NO: 46049 - protein, 13 aa, synthetic construct
AARDPYTTGWFKI

SEQ ID NO: 46050 - protein, 12 aa, synthetic construct
AAWGRATGWFKI

SEQ ID NO: 46051 - protein, 12 aa, synthetic construct
AAWDRNTGWFKI

SEQ ID NO: 46052 - protein, 11 aa, synthetic construct
AAWEATGRFKI

SEQ ID NO: 46053 - protein, 13 aa, synthetic construct
AAWDYRPTGWLKI

SEQ ID NO: 46054 - protein, 13 aa, synthetic construct
AAWDQYNTGWFKI

SEQ ID NO: 46055 - protein, 12 aa, synthetic construct
AAWESTTGWFKI

SEQ ID NO: 46056 - protein, 13 aa, synthetic construct
AAWDYRAPGWFKI

SEQ ID NO: 46057 - protein, 12 aa, synthetic construct
AALAHTTGWFKI

SEQ ID NO: 46058 - protein, 10 aa, synthetic construct
AAWETGWFKV

SEQ ID NO: 46059 - protein, 12 aa, synthetic construct
AAWDYPTGWFKV

SEQ ID NO: 46060 - protein, 9 aa, synthetic construct
AAWNYYKKL

SEQ ID NO: 46061 - protein, 10 aa, synthetic construct
AALDFGWFKI

SEQ ID NO: 46062 - protein, 12 aa, synthetic construct
AAWDYPPGWFKI

SEQ ID NO: 46063 - protein, 10 aa, synthetic construct
AAWETSWFKI

SEQ ID NO: 46064 - protein, 12 aa, synthetic construct
AAWDHTTGRFKI

SEQ ID NO: 46065 - protein, 12 aa, synthetic construct
AALDLPTGWFKI

SEQ ID NO: 46066 - protein, 12 aa, synthetic construct
AAWDHPTGWFKI

SEQ ID NO: 46067 - protein, 11 aa, synthetic construct
AAWETTGWFNI

SEQ ID NO: 46068 - protein, 11 aa, synthetic construct
AAWETTGWLKI

SEQ ID NO: 46069 - protein, 11 aa, synthetic construct
AAWDHPCWFKI

SEQ ID NO: 46070 - protein, 13 aa, synthetic construct
AAWRENTTGWFKI

SEQ ID NO: 46071 - protein, 13 aa, synthetic construct
AALDYRPTGWFKI

SEQ ID NO: 46072 - protein, 12 aa, synthetic construct
AAWGRTTGWFKI

SEQ ID NO: 46073 - protein, 12 aa, synthetic construct
AAWDYNTGWLKI

SEQ ID NO: 46074 - protein, 12 aa, synthetic construct
AAWDSATGWLKI

SEQ ID NO: 46075 - protein, 12 aa, synthetic construct
AAGDLGTGWLKI

SEQ ID NO: 46076 - protein, 12 aa, synthetic construct
AAWDYNPGWFKI

SEQ ID NO: 46077 - protein, 12 aa, synthetic construct
AAWDFTTGWLKI

SEQ ID NO: 46078 - protein, 13 aa, synthetic construct
AAWDYNAAGWFRI

SEQ ID NO: 46079 - protein, 12 aa, synthetic construct
AALGNTTGWFKI

SEQ ID NO: 46080 - protein, 12 aa, synthetic construct
AAGDRATGWFKI

SEQ ID NO: 46081 - protein, 8 aa, synthetic construct
AAWDLFKI

SEQ ID NO: 46082 - protein, 11 aa, synthetic construct
LRGDIPLVGSR

SEQ ID NO: 46083 - protein, 11 aa, synthetic construct
LRGPIPLVGSR

SEQ ID NO: 46084 - protein, 11 aa, synthetic construct
AAWDNTGLFKI

SEQ ID NO: 46085 - protein, 9 aa, synthetic construct
AAWDYWLKI

SEQ ID NO: 46086 - protein, 12 aa, synthetic construct
AAWDYVTGWFKI

SEQ ID NO: 46087 - protein, 12 aa, synthetic construct
AAWGYTTGRFKI

SEQ ID NO: 46088 - protein, 8 aa, synthetic construct
AAWDYVKI

SEQ ID NO: 46089 - protein, 12 aa, synthetic construct
AAGDWATGWFKI

SEQ ID NO: 46090 - protein, 9 aa, synthetic construct
AAWGYTTGW

SEQ ID NO: 46091 - protein, 10 aa, synthetic construct
LRGRPLVGSR

SEQ ID NO: 46092 - protein, 12 aa, synthetic construct
AAGDWGTGWFKI

SEQ ID NO: 46093 - protein, 11 aa, synthetic construct
LRGRIPLVGSR

SEQ ID NO: 46094 - protein, 10 aa, synthetic construct
AAWGTSWFKI

SEQ ID NO: 46095 - protein, 12 aa, synthetic construct
AAWGYTTGWFKL

SEQ ID NO: 46096 - protein, 13 aa, synthetic construct
AAGDYFTTGWFKI

SEQ ID NO: 46097 - protein, 12 aa, synthetic construct
AAWENTTGRFKI

SEQ ID NO: 46098 - protein, 12 aa, synthetic construct
AAWDYTAGWFKI

SEQ ID NO: 46099 - protein, 12 aa, synthetic construct
AAWGYTTGWFNI

SEQ ID NO: 46100 - protein, 11 aa, synthetic construct
LRGISPLVGSR

SEQ ID NO: 46101 - protein, 13 aa, synthetic construct
AAWDRDTTGWFKI

SEQ ID NO: 46102 - protein, 13 aa, synthetic construct
AAWDPDTTGWFKI

SEQ ID NO: 46103 - protein, 11 aa, synthetic construct
AAWGTTGWFEI

SEQ ID NO: 46104 - protein, 10 aa, synthetic construct
AADTTGWLKI

SEQ ID NO: 46105 - protein, 10 aa, synthetic construct
AAWGTGWSKI

SEQ ID NO: 46106 - protein, 13 aa, synthetic construct
AAGGGDTTGWFKI

SEQ ID NO: 46107 - protein, 12 aa, synthetic construct
AAWGYSTGWFKI

SEQ ID NO: 46108 - protein, 11 aa, synthetic construct
AAWDYTGWLKI

SEQ ID NO: 46109 - protein, 12 aa, synthetic construct
VAWDYPTGWFKI

SEQ ID NO: 46110 - protein, 11 aa, synthetic construct
LRGGIPLVGSR

SEQ ID NO: 46111 - protein, 12 aa, synthetic construct
AAWDRGSGWFNI

SEQ ID NO: 46112 - protein, 10 aa, synthetic construct
AALGTGWFKI

SEQ ID NO: 46113 - protein, 12 aa, synthetic construct
AALDDTTGWFKI

SEQ ID NO: 46114 - protein, 12 aa, synthetic construct
AAWEYTTGWFRI

SEQ ID NO: 46115 - protein, 12 aa, synthetic construct
AAWDYGTGWLKI

SEQ ID NO: 46116 - protein, 10 aa, synthetic construct
AAWDFGWFKV

SEQ ID NO: 46117 - protein, 11 aa, synthetic construct
AAWGTTGWFRI

SEQ ID NO: 46118 - protein, 11 aa, synthetic construct
AAPDTTGWFKI

SEQ ID NO: 46119 - protein, 12 aa, synthetic construct
AAWEYTTGWFKV

SEQ ID NO: 46120 - protein, 11 aa, synthetic construct
AALYTTGWFKI

SEQ ID NO: 46121 - protein, 12 aa, synthetic construct
AAWDFSTGWFKI

SEQ ID NO: 46122 - protein, 12 aa, synthetic construct
AAWDFNTGWFKI

SEQ ID NO: 46123 - protein, 9 aa, synthetic construct
AALVRWFKI

SEQ ID NO: 46124 - protein, 11 aa, synthetic construct
AAPNTSGWFKI

SEQ ID NO: 46125 - protein, 11 aa, synthetic construct
AAWDSGGRFKI

SEQ ID NO: 46126 - protein, 12 aa, synthetic construct
AAWDDTTGWSKI

SEQ ID NO: 46127 - protein, 7 aa, synthetic construct
AACWFRI

SEQ ID NO: 46128 - protein, 11 aa, synthetic construct
TAWEATGWFKI

SEQ ID NO: 46129 - protein, 12 aa, synthetic construct
AAWDLGTGLFKI

SEQ ID NO: 46130 - protein, 12 aa, synthetic construct
AAWDRGPGWFKI

SEQ ID NO: 46131 - protein, 11 aa, synthetic construct
AAWHTTGRFKI

SEQ ID NO: 46132 - protein, 13 aa, synthetic construct
AAWDDDNTGWFKI

SEQ ID NO: 46133 - protein, 12 aa, synthetic construct
AAWDLGTGWSKI

SEQ ID NO: 46134 - protein, 13 aa, synthetic construct
AAWGTYTTGWSKI

SEQ ID NO: 46135 - protein, 10 aa, synthetic construct
AAWGKYYKKL

SEQ ID NO: 46136 - protein, 12 aa, synthetic construct
AAWDLGTGWYKI

SEQ ID NO: 46137 - protein, 11 aa, synthetic construct
AAWGTTGWFQI

SEQ ID NO: 46138 - protein, 12 aa, synthetic construct
AAWVNNTGWFKI

SEQ ID NO: 46139 - protein, 10 aa, synthetic construct
AAWGTGWVKI

SEQ ID NO: 46140 - protein, 10 aa, synthetic construct
AAWDLGYNKL

SEQ ID NO: 46141 - protein, 9 aa, synthetic construct
AAWGYYNKL

SEQ ID NO: 46142 - protein, 12 aa, synthetic construct
AAWDSTTGWFKV

SEQ ID NO: 46143 - protein, 14 aa, synthetic construct
AAWDLPHTPGWFKI

SEQ ID NO: 46144 - protein, 10 aa, synthetic construct
AAWTTGWFEI

SEQ ID NO: 46145 - protein, 9 aa, synthetic construct
AAWGYYKKH

SEQ ID NO: 46146 - protein, 11 aa, synthetic construct
AAWDSTSWFKI

SEQ ID NO: 46147 - protein, 12 aa, synthetic construct
AAWAYTTGWFKL

SEQ ID NO: 46148 - protein, 11 aa, synthetic construct
AAWGPTGWLKI

SEQ ID NO: 46149 - protein, 10 aa, synthetic construct
AAWGTGWFKL

SEQ ID NO: 46150 - protein, 13 aa, synthetic construct
AAWDLDTAGWFRI

SEQ ID NO: 46151 - protein, 13 aa, synthetic construct
AAWDRNTTGWFKI

SEQ ID NO: 46152 - protein, 9 aa, synthetic construct
TAWDYYKKL

SEQ ID NO: 46153 - protein, 11 aa, synthetic construct
AADYTTGWFKI

SEQ ID NO: 46154 - protein, 14 aa, synthetic construct
AAWDPGDTTGWFKV

SEQ ID NO: 46155 - protein, 10 aa, synthetic construct
AAWVNYYKKL

SEQ ID NO: 46156 - protein, 11 aa, synthetic construct
AAWYTTGWSKI

SEQ ID NO: 46157 - protein, 10 aa, synthetic construct
AAWISGWFKI

SEQ ID NO: 46158 - protein, 13 aa, synthetic construct
AAWDRGTTGWFKI

SEQ ID NO: 46159 - protein, 13 aa, synthetic construct
AAWGLDTTGWFKI

SEQ ID NO: 46160 - protein, 10 aa, synthetic construct
AADTTGWFEI

SEQ ID NO: 46161 - protein, 12 aa, synthetic construct
AAWDDTTGWFKV

SEQ ID NO: 46162 - protein, 14 aa, synthetic construct
AAWDSGGNTGWLKI

SEQ ID NO: 46163 - protein, 12 aa, synthetic construct
AAWDDTTGWFNI

SEQ ID NO: 46164 - protein, 12 aa, synthetic construct
AAWYYTTGWFKI

SEQ ID NO: 46165 - protein, 14 aa, synthetic construct
AAWYYWLATGWFKI

SEQ ID NO: 46166 - protein, 12 aa, synthetic construct
AAWDLGAGWFKI

SEQ ID NO: 46167 - protein, 12 aa, synthetic construct
AAWIGTTGWFKI

SEQ ID NO: 46168 - protein, 11 aa, synthetic construct
AAWHTTGWFNI

SEQ ID NO: 46169 - protein, 11 aa, synthetic construct
AAWDSTGWFQI

SEQ ID NO: 46170 - protein, 12 aa, synthetic construct
AAWVNTTGWFRI

SEQ ID NO: 46171 - protein, 12 aa, synthetic construct
AAWGYNTGWLKI

SEQ ID NO: 46172 - protein, 12 aa, synthetic construct
AAWAYTTGWFKV

SEQ ID NO: 46173 - protein, 11 aa, synthetic construct
AAWHTTGWFKM

SEQ ID NO: 46174 - protein, 11 aa, synthetic construct
AAWAYTDWFKI

SEQ ID NO: 46175 - protein, 7 aa, synthetic construct
AAWGKKL

SEQ ID NO: 46176 - protein, 13 aa, synthetic construct
AAWDEETTGWFRI

SEQ ID NO: 46177 - protein, 11 aa, synthetic construct
AAWDLPSNKKL

SEQ ID NO: 46178 - protein, 12 aa, synthetic construct
AAWDFATGGFKI

SEQ ID NO: 46179 - protein, 12 aa, synthetic construct
AAWDSGTGLFKI

SEQ ID NO: 46180 - protein, 10 aa, synthetic construct
AADTPGWFKI

SEQ ID NO: 46181 - protein, 13 aa, synthetic construct
AEWGHYTTGWFKI

SEQ ID NO: 46182 - protein, 10 aa, synthetic construct
AAWDFGLFKI

SEQ ID NO: 46183 - protein, 12 aa, synthetic construct
AAWVHNTGWFKI

SEQ ID NO: 46184 - protein, 11 aa, synthetic construct
AAWDNEGWFKI

SEQ ID NO: 46185 - protein, 11 aa, synthetic construct
AAWAYAGWFKI

SEQ ID NO: 46186 - protein, 12 aa, synthetic construct
AAWAWTTGWFKI

SEQ ID NO: 46187 - protein, 11 aa, synthetic construct
AAWGTTCWFKI

SEQ ID NO: 46188 - protein, 8 aa, synthetic construct
AAWGYTTG

SEQ ID NO: 46189 - protein, 10 aa, synthetic construct
AEWGTGWLKI

SEQ ID NO: 46190 - protein, 11 aa, synthetic construct
AAWAWTGWFKI

SEQ ID NO: 46191 - protein, 12 aa, synthetic construct
AAWGYTTDWFKI

SEQ ID NO: 46192 - protein, 12 aa, synthetic construct
AAWDNNTGWFKI

SEQ ID NO: 46193 - protein, 9 aa, synthetic construct
AAWDFDKKL

SEQ ID NO: 46194 - protein, 12 aa, synthetic construct
AAWDFATGWLKI

SEQ ID NO: 46195 - protein, 11 aa, synthetic construct
AAWDNTGWFEI

SEQ ID NO: 46196 - protein, 12 aa, synthetic construct
AAWDRATCWFKI

SEQ ID NO: 46197 - protein, 12 aa, synthetic construct
AAWDNTPGWFKI

SEQ ID NO: 46198 - protein, 9 aa, synthetic construct
AAWAVMEKL

SEQ ID NO: 46199 - protein, 12 aa, synthetic construct
AAWDRAPGWFKI

SEQ ID NO: 46200 - protein, 11 aa, synthetic construct
AAWATTGWFTI

SEQ ID NO: 46201 - protein, 12 aa, synthetic construct
AAWDNTTGWFEI

SEQ ID NO: 46202 - protein, 11 aa, synthetic construct
AAWATTGWFRI

SEQ ID NO: 46203 - protein, 8 aa, synthetic construct
AAFGWLKI

SEQ ID NO: 46204 - protein, 11 aa, synthetic construct
AAWAYEGWFKI

SEQ ID NO: 46205 - protein, 13 aa, synthetic construct
AAWAYEVTGWFKI

SEQ ID NO: 46206 - protein, 12 aa, synthetic construct
AAWGYTTGWFQI

SEQ ID NO: 46207 - protein, 14 aa, synthetic construct
AAWDPGDTTGWFNI

SEQ ID NO: 46208 - protein, 10 aa, synthetic construct
SFYTTGWFKI

SEQ ID NO: 46209 - protein, 12 aa, synthetic construct
AAWDRATGWLKI

SEQ ID NO: 46210 - protein, 12 aa, synthetic construct
AAWDLSTGRFKI

SEQ ID NO: 46211 - protein, 13 aa, synthetic construct
AAWGKGTTGWFKI

SEQ ID NO: 46212 - protein, 13 aa, synthetic construct
AAWAYRPTGWFKI

SEQ ID NO: 46213 - protein, 12 aa, synthetic construct
AAWGVTPGWFKI

SEQ ID NO: 46214 - protein, 12 aa, synthetic construct
AAWDLSTGWLKI

SEQ ID NO: 46215 - protein, 13 aa, synthetic construct
AAWAYRATGWFKI

SEQ ID NO: 46216 - protein, 11 aa, synthetic construct
AAWDLTGWFKI

SEQ ID NO: 46217 - protein, 11 aa, synthetic construct
AAWDSVGWFKI

SEQ ID NO: 46218 - protein, 10 aa, synthetic construct
AAWDFGWFRI

SEQ ID NO: 46219 - protein, 10 aa, synthetic construct
AAWGHYYKKL

SEQ ID NO: 46220 - protein, 11 aa, synthetic construct
AAWTTTGWFKI

SEQ ID NO: 46221 - protein, 12 aa, synthetic construct
AAWDRATGWFNI

SEQ ID NO: 46222 - protein, 7 aa, synthetic construct
AACWLKI

SEQ ID NO: 46223 - protein, 9 aa, synthetic construct
AAWDSWLKI

SEQ ID NO: 46224 - protein, 12 aa, synthetic construct
AAWDSGPGWFKI

SEQ ID NO: 46225 - protein, 12 aa, synthetic construct
AAWDNTTGWLKI

SEQ ID NO: 46226 - protein, 9 aa, synthetic construct
AAWGYDKKL

SEQ ID NO: 46227 - protein, 11 aa, synthetic construct
AAWDETGWFKI

SEQ ID NO: 46228 - protein, 13 aa, synthetic construct
AAWDLYTTGWLKI

SEQ ID NO: 46229 - protein, 13 aa, synthetic construct
AAWEGNTTGWFEI

SEQ ID NO: 46230 - protein, 13 aa, synthetic construct
AAWDSGPTGWFKI

SEQ ID NO: 46231 - protein, 11 aa, synthetic construct
AAWYTTGWFRI

SEQ ID NO: 46232 - protein, 10 aa, synthetic construct
AAWITGWLKI

SEQ ID NO: 46233 - protein, 12 aa, synthetic construct
AAWDPLNYHKKL

SEQ ID NO: 46234 - protein, 12 aa, synthetic construct
AAWDDTTCWFKI

SEQ ID NO: 46235 - protein, 11 aa, synthetic construct
AAWDCTGRFKI

SEQ ID NO: 46236 - protein, 11 aa, synthetic construct
AAWDSNYYKKH

SEQ ID NO: 46237 - protein, 13 aa, synthetic construct
AAWRGNTTSWFKI

SEQ ID NO: 46238 - protein, 9 aa, synthetic construct
AAWDFYKEL

SEQ ID NO: 46239 - protein, 10 aa, synthetic construct
AAWVTGWSKI

SEQ ID NO: 46240 - protein, 11 aa, synthetic construct
AAWATTGWFKL

SEQ ID NO: 46241 - protein, 12 aa, synthetic construct
AAWDSATGRFKI

SEQ ID NO: 46242 - protein, 11 aa, synthetic construct
AAWDFRYYKKI

SEQ ID NO: 46243 - protein, 10 aa, synthetic construct
AAWDGDYKKL

SEQ ID NO: 46244 - protein, 11 aa, synthetic construct
AAWVTTGWFKI

SEQ ID NO: 46245 - protein, 11 aa, synthetic construct
AAEYNTGWVKI

SEQ ID NO: 46246 - protein, 12 aa, synthetic construct
AAWDCRGGWVKI

SEQ ID NO: 46247 - protein, 9 aa, synthetic construct
AAWPYYNKL

SEQ ID NO: 46248 - protein, 10 aa, synthetic construct
AAWDGGWLKI

SEQ ID NO: 46249 - protein, 12 aa, synthetic construct
AAWPYTTGWFKI

SEQ ID NO: 46250 - protein, 12 aa, synthetic construct
AAWDGTTGWFKI

SEQ ID NO: 46251 - protein, 12 aa, synthetic construct
AAWVYNTGWFKI

SEQ ID NO: 46252 - protein, 13 aa, synthetic construct
AAWDQRATGWFKI

SEQ ID NO: 46253 - protein, 12 aa, synthetic construct
AAWDCPTGWFQI

SEQ ID NO: 46254 - protein, 11 aa, synthetic construct
AACNTTGWFKI

SEQ ID NO: 46255 - protein, 10 aa, synthetic construct
AAWDPYTTGW

SEQ ID NO: 46256 - protein, 12 aa, synthetic construct
AAWDCPTGRFKI

SEQ ID NO: 46257 - protein, 15 aa, synthetic construct
AAWVPEGYTTGWFEI

SEQ ID NO: 46258 - protein, 11 aa, synthetic construct
AAWDHPGLFKI

SEQ ID NO: 46259 - protein, 15 aa, synthetic construct
AAWVPEGYTTGLFKI

SEQ ID NO: 46260 - protein, 11 aa, synthetic construct
AAWSTTGWFKI

SEQ ID NO: 46261 - protein, 12 aa, synthetic construct
AAWGRGSGWFKI

SEQ ID NO: 46262 - protein, 13 aa, synthetic construct
AAWDDDTTGWFRI

SEQ ID NO: 46263 - protein, 12 aa, synthetic construct
AAGACTTGWFKI

SEQ ID NO: 46264 - protein, 13 aa, synthetic construct
AAWDSEAPGWFKI

SEQ ID NO: 46265 - protein, 12 aa, synthetic construct
AAWVRTTGWFKI

SEQ ID NO: 46266 - protein, 13 aa, synthetic construct
AAWDSEATGLFKI

SEQ ID NO: 46267 - protein, 13 aa, synthetic construct
AAWDSGAPGWFKI

SEQ ID NO: 46268 - protein, 10 aa, synthetic construct
AAWDSDYKKL

SEQ ID NO: 46269 - protein, 11 aa, synthetic construct
AAWVSTGWFKI

SEQ ID NO: 46270 - protein, 11 aa, synthetic construct
TAWDTTGWFKI

SEQ ID NO: 46271 - protein, 13 aa, synthetic construct
AAWDPYTTGWFEI

SEQ ID NO: 46272 - protein, 11 aa, synthetic construct
AAWDSNGWFKI

SEQ ID NO: 46273 - protein, 12 aa, synthetic construct
AAWDFTAGWFKI

SEQ ID NO: 46274 - protein, 13 aa, synthetic construct
AAWDSNNTGWFKI

SEQ ID NO: 46275 - protein, 10 aa, synthetic construct
AAFTTGWFRI

SEQ ID NO: 46276 - protein, 12 aa, synthetic construct
AAWRYTTGWFKI

SEQ ID NO: 46277 - protein, 13 aa, synthetic construct
AAWGNYNTGWFKI

SEQ ID NO: 46278 - protein, 13 aa, synthetic construct
AAWDSDTTGWLKI

SEQ ID NO: 46279 - protein, 9 aa, synthetic construct
AAWGNYKKL

SEQ ID NO: 46280 - protein, 11 aa, synthetic construct
AAEYTPGWFKI

SEQ ID NO: 46281 - protein, 12 aa, synthetic construct
AAWDCTPGWFKI

SEQ ID NO: 46282 - protein, 12 aa, synthetic construct
AAWDFTTGWFKL

SEQ ID NO: 46283 - protein, 13 aa, synthetic construct
AAWDSNTTGWFEI

SEQ ID NO: 46284 - protein, 9 aa, synthetic construct
AAWSGWFKI

SEQ ID NO: 46285 - protein, 11 aa, synthetic construct
AAWDCTGWLKI

SEQ ID NO: 46286 - protein, 13 aa, synthetic construct
AAWDPYTTGWLKI

SEQ ID NO: 46287 - protein, 8 aa, synthetic construct
AAWGRFKI

SEQ ID NO: 46288 - protein, 10 aa, synthetic construct
AAWPTGWLKI

SEQ ID NO: 46289 - protein, 12 aa, synthetic construct
AAWDCNTGWFKI

SEQ ID NO: 46290 - protein, 13 aa, synthetic construct
AAWGQYTTGWFKI

SEQ ID NO: 46291 - protein, 13 aa, synthetic construct
AAWWNYTTGWFKI

SEQ ID NO: 46292 - protein, 12 aa, synthetic construct
AAWGPTTGWFKI

SEQ ID NO: 46293 - protein, 12 aa, synthetic construct
AAWDHTTGWSKI

SEQ ID NO: 46294 - protein, 11 aa, synthetic construct
TAWDATGWFKI

SEQ ID NO: 46295 - protein, 12 aa, synthetic construct
AAWDRTTGWFEI

SEQ ID NO: 46296 - protein, 11 aa, synthetic construct
AAWDSPYYKKP

SEQ ID NO: 46297 - protein, 10 aa, synthetic construct
AAWTAGWFKI

SEQ ID NO: 46298 - protein, 10 aa, synthetic construct
AAWGTCWFKI

SEQ ID NO: 46299 - protein, 11 aa, synthetic construct
AAWDITGWFKI

SEQ ID NO: 46300 - protein, 14 aa, synthetic construct
AAWDSGGHTGWFKI

SEQ ID NO: 46301 - protein, 11 aa, synthetic construct
AAWNTTGWFKM

SEQ ID NO: 46302 - protein, 6 aa, synthetic construct
AAWGTG

SEQ ID NO: 46303 - protein, 11 aa, synthetic construct
AAWNTPGWFKI

SEQ ID NO: 46304 - protein, 11 aa, synthetic construct
AAWNNTGWFKI

SEQ ID NO: 46305 - protein, 11 aa, synthetic construct
AAWGTTGWFKL

SEQ ID NO: 46306 - protein, 12 aa, synthetic construct
AAWNCTTGWFKI

SEQ ID NO: 46307 - protein, 13 aa, synthetic construct
AAWDRRTTGWFKV

SEQ ID NO: 46308 - protein, 12 aa, synthetic construct
AAWDQTTGWFKI

SEQ ID NO: 46309 - protein, 9 aa, synthetic construct
AAWKNYKKL

SEQ ID NO: 46310 - protein, 13 aa, synthetic construct
AAWDQNTTGWFKI

SEQ ID NO: 46311 - protein, 10 aa, synthetic construct
AAWGTGRFKI

SEQ ID NO: 46312 - protein, 11 aa, synthetic construct
AAWYTTGRFKI

SEQ ID NO: 46313 - protein, 11 aa, synthetic construct
AAWGTTGWFNI

SEQ ID NO: 46314 - protein, 11 aa, synthetic construct
AAWDSTGLFKI

SEQ ID NO: 46315 - protein, 11 aa, synthetic construct
AAWYTTGWFKM

SEQ ID NO: 46316 - protein, 12 aa, synthetic construct
AAWDLATGWFRI

SEQ ID NO: 46317 - protein, 12 aa, synthetic construct
AAWDDTTGWFEI

SEQ ID NO: 46318 - protein, 12 aa, synthetic construct
AAWYSGTGWFKI

SEQ ID NO: 46319 - protein, 13 aa, synthetic construct
AAWYSGATGWFKI

SEQ ID NO: 46320 - protein, 12 aa, synthetic construct
AAWDHTTDWFKI

SEQ ID NO: 46321 - protein, 11 aa, synthetic construct
AAWWTTGWFEI

SEQ ID NO: 46322 - protein, 10 aa, synthetic construct
AAWGSGWLKI

SEQ ID NO: 46323 - protein, 13 aa, synthetic construct
AAWDCGTTGWLKI

SEQ ID NO: 46324 - protein, 14 aa, synthetic construct
AAWDPSHTTGWFKI

SEQ ID NO: 46325 - protein, 12 aa, synthetic construct
AAWGVTTGWLKI

SEQ ID NO: 46326 - protein, 13 aa, synthetic construct
AAWDSGATGWLKI

SEQ ID NO: 46327 - protein, 13 aa, synthetic construct
AAWDCGTPGWFKI

SEQ ID NO: 46328 - protein, 11 aa, synthetic construct
AAWGSLGWFKI

SEQ ID NO: 46329 - protein, 11 aa, synthetic construct
AAWDCEGWFKI

SEQ ID NO: 46330 - protein, 9 aa, synthetic construct
AAWSYTTGW

SEQ ID NO: 46331 - protein, 12 aa, synthetic construct
AAWDRTTGWLKI

SEQ ID NO: 46332 - protein, 12 aa, synthetic construct
AAWGSTTGWFKI

SEQ ID NO: 46333 - protein, 12 aa, synthetic construct
AAWDRTTGWFKV

SEQ ID NO: 46334 - protein, 13 aa, synthetic construct
AAWDSGATGWSKI

SEQ ID NO: 46335 - protein, 12 aa, synthetic construct
AAWDCATGWFKT

SEQ ID NO: 46336 - protein, 11 aa, synthetic construct
AAWDPIGWFKI

SEQ ID NO: 46337 - protein, 8 aa, synthetic construct
TAWDRGKI

SEQ ID NO: 46338 - protein, 12 aa, synthetic construct
AAWDCATGLFKI

SEQ ID NO: 46339 - protein, 12 aa, synthetic construct
AAWDHTTGWFEI

SEQ ID NO: 46340 - protein, 12 aa, synthetic construct
AAWDHTTGWFKM

SEQ ID NO: 46341 - protein, 12 aa, synthetic construct
AAWSYTTGWFNI

SEQ ID NO: 46342 - protein, 12 aa, synthetic construct
AAWDFATGWFNI

SEQ ID NO: 46343 - protein, 9 aa, synthetic construct
AAWPGWFKI

SEQ ID NO: 46344 - protein, 13 aa, synthetic construct
AAWYQYTTGWFKI

SEQ ID NO: 46345 - protein, 11 aa, synthetic construct
AAADTTGWFKI

SEQ ID NO: 46346 - protein, 12 aa, synthetic construct
AAWANTTGWLKI

SEQ ID NO: 46347 - protein, 10 aa, synthetic construct
TAWGGYYKKL

SEQ ID NO: 46348 - protein, 14 aa, synthetic construct
VAWDSGGNTGWFKI

SEQ ID NO: 46349 - protein, 11 aa, synthetic construct
DAWDTNGWFKI

SEQ ID NO: 46350 - protein, 11 aa, synthetic construct
AALETTGWFKI

SEQ ID NO: 46351 - protein, 12 aa, synthetic construct
AAWDYNTGWFNI

SEQ ID NO: 46352 - protein, 12 aa, synthetic construct
AALGDTTGWFKI

SEQ ID NO: 46353 - protein, 12 aa, synthetic construct
AAWEYITGWFKI

SEQ ID NO: 46354 - protein, 13 aa, synthetic construct
AAWDYNATGWFKI

SEQ ID NO: 46355 - protein, 13 aa, synthetic construct
AAWDYNAAGWLKI

SEQ ID NO: 46356 - protein, 8 aa, synthetic construct
AALGWFKI

SEQ ID NO: 46357 - protein, 12 aa, synthetic construct
AAWEYNTGWFKI

SEQ ID NO: 46358 - protein, 13 aa, synthetic construct
AAWDYMATGWFKI

SEQ ID NO: 46359 - protein, 12 aa, synthetic construct
AAWEYPTGWVKI

SEQ ID NO: 46360 - protein, 13 aa, synthetic construct
AAWEYRATGWFKI

SEQ ID NO: 46361 - protein, 10 aa, synthetic construct
AAWDTDWFKI

SEQ ID NO: 46362 - protein, 12 aa, synthetic construct
AAWEYTAGWFKI

SEQ ID NO: 46363 - protein, 12 aa, synthetic construct
AAWEYTTCWFKI

SEQ ID NO: 46364 - protein, 13 aa, synthetic construct
AAWDYKAAGWFKI

SEQ ID NO: 46365 - protein, 12 aa, synthetic construct
AAWEYTTGWFEI

SEQ ID NO: 46366 - protein, 11 aa, synthetic construct
AAPNTPGWFKI

SEQ ID NO: 46367 - protein, 9 aa, synthetic construct
AAPTGWSKI

SEQ ID NO: 46368 - protein, 11 aa, synthetic construct
DAWDTTGWFKI

SEQ ID NO: 46369 - protein, 12 aa, synthetic construct
AALEDTTGWFKI

SEQ ID NO: 46370 - protein, 13 aa, synthetic construct
DAWDYEVTGWFKI

SEQ ID NO: 46371 - protein, 14 aa, synthetic construct
AAWDYPFTTGWLKI

SEQ ID NO: 46372 - protein, 10 aa, synthetic construct
AAWETGWFNI

SEQ ID NO: 46373 - protein, 12 aa, synthetic construct
AAWDYPTGWFTI

SEQ ID NO: 46374 - protein, 12 aa, synthetic construct
AALAYTTGWFKI

SEQ ID NO: 46375 - protein, 12 aa, synthetic construct
AAWDYPTGWFNI

SEQ ID NO: 46376 - protein, 12 aa, synthetic construct
AAWDYPTGWFKT

SEQ ID NO: 46377 - protein, 12 aa, synthetic construct
AALDFTTGWFKI

SEQ ID NO: 46378 - protein, 11 aa, synthetic construct
AAWETTGLFNI

SEQ ID NO: 46379 - protein, 11 aa, synthetic construct
AALDNTGWFKI

SEQ ID NO: 46380 - protein, 14 aa, synthetic construct
AAWDYPFTTGWFKT

SEQ ID NO: 46381 - protein, 13 aa, synthetic construct
AAWDYNTTGWSKI

SEQ ID NO: 46382 - protein, 12 aa, synthetic construct
AALDSATGWFKI

SEQ ID NO: 46383 - protein, 12 aa, synthetic construct
AAWETTTGWFKI

SEQ ID NO: 46384 - protein, 10 aa, synthetic construct
AALDSGWFKI

SEQ ID NO: 46385 - protein, 14 aa, synthetic construct
AAWDYNYTTGWFKI

SEQ ID NO: 46386 - protein, 12 aa, synthetic construct
DAWDYTTGWLKI

SEQ ID NO: 46387 - protein, 12 aa, synthetic construct
DAWDYTTGWFKI

SEQ ID NO: 46388 - protein, 9 aa, synthetic construct
AAWEVYKRL

SEQ ID NO: 46389 - protein, 8 aa, synthetic construct
AALDWFKI

SEQ ID NO: 46390 - protein, 11 aa, synthetic construct
AAPYNTGWFKI

SEQ ID NO: 46391 - protein, 12 aa, synthetic construct
AAWEYTTGWSKI

SEQ ID NO: 46392 - protein, 14 aa, synthetic construct
AAWDYGPSTGWFNI

SEQ ID NO: 46393 - protein, 12 aa, synthetic construct
AAWGATTGWFKI

SEQ ID NO: 46394 - protein, 10 aa, synthetic construct
AAWFTGWLKI

SEQ ID NO: 46395 - protein, 14 aa, synthetic construct
AARDYPGTTGWFKI

SEQ ID NO: 46396 - protein, 12 aa, synthetic construct
AARDYPTGWFKI

SEQ ID NO: 46397 - protein, 11 aa, synthetic construct
AVGDTTGWFKI

SEQ ID NO: 46398 - protein, 12 aa, synthetic construct
ATWGYTTGWFKI

SEQ ID NO: 46399 - protein, 12 aa, synthetic construct
AAREDTTGWFKI

SEQ ID NO: 46400 - protein, 11 aa, synthetic construct
AAWGATGWFKI

SEQ ID NO: 46401 - protein, 11 aa, synthetic construct
ATWDSGGWFKI

SEQ ID NO: 46402 - protein, 12 aa, synthetic construct
AARGLATGWFKI

SEQ ID NO: 46403 - protein, 11 aa, synthetic construct
AVGENTGWFKI

SEQ ID NO: 46404 - protein, 11 aa, synthetic construct
AARGTTGWFKI

SEQ ID NO: 46405 - protein, 12 aa, synthetic construct
AARGVTTGWFKI

SEQ ID NO: 46406 - protein, 12 aa, synthetic construct
ATWDLPTGWFKI

SEQ ID NO: 46407 - protein, 14 aa, synthetic construct
AAWDYCLATGWFKI

SEQ ID NO: 46408 - protein, 12 aa, synthetic construct
AARLYATGWFKI

SEQ ID NO: 46409 - protein, 12 aa, synthetic construct
AARLYTTGLFKI

SEQ ID NO: 46410 - protein, 12 aa, synthetic construct
AAWDYATCWFKI

SEQ ID NO: 46411 - protein, 12 aa, synthetic construct
AAWDYAPGWFKI

SEQ ID NO: 46412 - protein, 8 aa, synthetic construct
AARDYEKL

SEQ ID NO: 46413 - protein, 8 aa, synthetic construct
AAWDYEEL

SEQ ID NO: 46414 - protein, 12 aa, synthetic construct
AVWSYTTGWFKI

SEQ ID NO: 46415 - protein, 13 aa, synthetic construct
AAWDYFNTGWFKI

SEQ ID NO: 46416 - protein, 11 aa, synthetic construct
AVWHTTGWFKI

SEQ ID NO: 46417 - protein, 12 aa, synthetic construct
AVWGYTTGWFKI

SEQ ID NO: 46418 - protein, 12 aa, synthetic construct
AVWGGTTGWFKI

SEQ ID NO: 46419 - protein, 13 aa, synthetic construct
AAWDYGAPGWFKI

SEQ ID NO: 46420 - protein, 11 aa, synthetic construct
AARDHPGWFKI

SEQ ID NO: 46421 - protein, 14 aa, synthetic construct
AVWDSGGNTGWFKI

SEQ ID NO: 46422 - protein, 13 aa, synthetic construct
AVWDRRTTGWFKI

SEQ ID NO: 46423 - protein, 13 aa, synthetic construct
AAWDYFTTGLFKI

SEQ ID NO: 46424 - protein, 11 aa, synthetic construct
AARDPTGWFKI

SEQ ID NO: 46425 - protein, 14 aa, synthetic construct
AAWDYEETTGWFKI

SEQ ID NO: 46426 - protein, 12 aa, synthetic construct
AVWDCTTGWFKI

SEQ ID NO: 46427 - protein, 13 aa, synthetic construct
AAWDYEVTGLFKI

SEQ ID NO: 46428 - protein, 11 aa, synthetic construct
AVRETTGWFKI

SEQ ID NO: 46429 - protein, 8 aa, synthetic construct
AAWDYEKH

SEQ ID NO: 46430 - protein, 11 aa, synthetic construct
AVGETTGWFRI

SEQ ID NO: 46431 - protein, 13 aa, synthetic construct
AARDSYTTGWFKI

SEQ ID NO: 46432 - protein, 11 aa, synthetic construct
AVGETTGWFEI

SEQ ID NO: 46433 - protein, 13 aa, synthetic construct
AARDWRATGWFKI

SEQ ID NO: 46434 - protein, 12 aa, synthetic construct
AAWDYPTGWSKI

SEQ ID NO: 46435 - protein, 11 aa, synthetic construct
AAGYTTGWSKI

SEQ ID NO: 46436 - protein, 10 aa, synthetic construct
AAWDWYYKKL

SEQ ID NO: 46437 - protein, 11 aa, synthetic construct
AAGYTTGWFRI

SEQ ID NO: 46438 - protein, 12 aa, synthetic construct
AAGDSGTGWFKI

SEQ ID NO: 46439 - protein, 13 aa, synthetic construct
AAWELYTTGWFKI

SEQ ID NO: 46440 - protein, 10 aa, synthetic construct
AAGDSGWFKI

SEQ ID NO: 46441 - protein, 13 aa, synthetic construct
AAWDYYTTDWFKI

SEQ ID NO: 46442 - protein, 13 aa, synthetic construct
AAGDSRTTGWFKI

SEQ ID NO: 46443 - protein, 12 aa, synthetic construct
PAWDYATGWFKI

SEQ ID NO: 46444 - protein, 13 aa, synthetic construct
AAGDSYTTGWFKI

SEQ ID NO: 46445 - protein, 10 aa, synthetic construct
LRPIPLVGSR

SEQ ID NO: 46446 - protein, 10 aa, synthetic construct
LRNIPLVGSR

SEQ ID NO: 46447 - protein, 9 aa, synthetic construct
LRIPLVGSR

SEQ ID NO: 46448 - protein, 8 aa, synthetic construct
LRGVVGSR

SEQ ID NO: 46449 - protein, 10 aa, synthetic construct
LRGTPLVGSR

SEQ ID NO: 46450 - protein, 11 aa, synthetic construct
AAGDTTGWLKI

SEQ ID NO: 46451 - protein, 10 aa, synthetic construct
LRGTGIIRNS

SEQ ID NO: 46452 - protein, 7 aa, synthetic construct
AAWDYWF

SEQ ID NO: 46453 - protein, 12 aa, synthetic construct
AAGDVGTGWFKI

SEQ ID NO: 46454 - protein, 8 aa, synthetic construct
AAWDYVKH

SEQ ID NO: 46455 - protein, 11 aa, synthetic construct
AAGDWTGWFKI

SEQ ID NO: 46456 - protein, 13 aa, synthetic construct
AAGDYDATGWFKI

SEQ ID NO: 46457 - protein, 9 aa, synthetic construct
QYTTGLFKI

SEQ ID NO: 46458 - protein, 9 aa, synthetic construct
QYTTGWFNI

SEQ ID NO: 46459 - protein, 4 aa, synthetic construct
RFKI

SEQ ID NO: 46460 - protein, 9 aa, synthetic construct
AAWEGWLKI

SEQ ID NO: 46461 - protein, 11 aa, synthetic construct
SAWDTTGWFKI

SEQ ID NO: 46462 - protein, 13 aa, synthetic construct
AAWEGNTAGWFKI

SEQ ID NO: 46463 - protein, 11 aa, synthetic construct
SAWDSPGWFKI

SEQ ID NO: 46464 - protein, 10 aa, synthetic construct
AAWEGGWFKI

SEQ ID NO: 46465 - protein, 13 aa, synthetic construct
AAWEGTTTGWFKI

SEQ ID NO: 46466 - protein, 12 aa, synthetic construct
SAWDRGTGWFKI

SEQ ID NO: 46467 - protein, 9 aa, synthetic construct
AACAGWFKI

SEQ ID NO: 46468 - protein, 9 aa, synthetic construct
AAWEGWIKI

SEQ ID NO: 46469 - protein, 9 aa, synthetic construct
AAWEGYKKL

SEQ ID NO: 46470 - protein, 10 aa, synthetic construct
AAWEAGWFKI

SEQ ID NO: 46471 - protein, 11 aa, synthetic construct
AAGDFTGWFKI

SEQ ID NO: 46472 - protein, 12 aa, synthetic construct
SAWDFTTGWFKI

SEQ ID NO: 46473 - protein, 14 aa, synthetic construct
AAGDGWGTTGWFKI

SEQ ID NO: 46474 - protein, 12 aa, synthetic construct
AAWEHTTGWFKI

SEQ ID NO: 46475 - protein, 12 aa, synthetic construct
AAGDLATGWFKI

SEQ ID NO: 46476 - protein, 12 aa, synthetic construct
AAWEKTTGWFKI

SEQ ID NO: 46477 - protein, 11 aa, synthetic construct
AAGDPTGWLKI

SEQ ID NO: 46478 - protein, 11 aa, synthetic construct
AAWEATGWCKV

SEQ ID NO: 46479 - protein, 10 aa, synthetic construct
LRGPTLVGSR

SEQ ID NO: 46480 - protein, 11 aa, synthetic construct
AAWENTGWLKI

SEQ ID NO: 46481 - protein, 12 aa, synthetic construct
AAWENTTGWFNI

SEQ ID NO: 46482 - protein, 10 aa, synthetic construct
AAWESGWFKI

SEQ ID NO: 46483 - protein, 11 aa, synthetic construct
LRGAIPLVGSR

SEQ ID NO: 46484 - protein, 12 aa, synthetic construct
AAGGYNTGWFKI

SEQ ID NO: 46485 - protein, 8 aa, synthetic construct
LLPLVGSR

SEQ ID NO: 46486 - protein, 9 aa, synthetic construct
AAGGYYKKL

SEQ ID NO: 46487 - protein, 11 aa, synthetic construct
AAGNTTGWFKI

SEQ ID NO: 46488 - protein, 12 aa, synthetic construct
AAWDYSTGWFKV

SEQ ID NO: 46489 - protein, 7 aa, synthetic construct
AAGREKP

SEQ ID NO: 46490 - protein, 9 aa, synthetic construct
AAGTGWFKI

SEQ ID NO: 46491 - protein, 12 aa, synthetic construct
AAWDYRTGWLKI

SEQ ID NO: 46492 - protein, 11 aa, synthetic construct
LRGFIPLVGSR

SEQ ID NO: 46493 - protein, 13 aa, synthetic construct
AAWDYRPTGWFRI

SEQ ID NO: 46494 - protein, 11 aa, synthetic construct
VAWDTTGWFKI

SEQ ID NO: 46495 - protein, 12 aa, synthetic construct
AAWDYRIGWLKI

SEQ ID NO: 46496 - protein, 11 aa, synthetic construct
AAWETAGWFKI

SEQ ID NO: 46497 - protein, 12 aa, synthetic construct
AAWDYRGGWFKI

SEQ ID NO: 46498 - protein, 13 aa, synthetic construct
AAWDYRATGWFNI

SEQ ID NO: 46499 - protein, 13 aa, synthetic construct
AAWDYRATGWFKL

SEQ ID NO: 46500 - protein, 13 aa, synthetic construct
AAWDYRATGLFKI

SEQ ID NO: 46501 - protein, 8 aa, synthetic construct
AAGGWLKI

SEQ ID NO: 46502 - protein, 13 aa, synthetic construct
AAGGNYTTGWFKI

SEQ ID NO: 46503 - protein, 12 aa, synthetic construct
AAWDYTTGWFQI

SEQ ID NO: 46504 - protein, 10 aa, synthetic construct
AAWENYYKKH

SEQ ID NO: 46505 - protein, 9 aa, synthetic construct
AAGDYYKKL

SEQ ID NO: 46506 - protein, 11 aa, synthetic construct
LRGITIIIRNS

SEQ ID NO: 46507 - protein, 12 aa, synthetic construct
AAGEDTTGWFKI

SEQ ID NO: 46508 - protein, 11 aa, synthetic construct
LRGIRPLVGSR

SEQ ID NO: 46509 - protein, 13 aa, synthetic construct
LRGIRLGTLVGSR

SEQ ID NO: 46510 - protein, 12 aa, synthetic construct
AAWDYTTGWFKL

SEQ ID NO: 46511 - protein, 9 aa, synthetic construct
LRGIRIRNS

SEQ ID NO: 46512 - protein, 12 aa, synthetic construct
AAGEYTTGWFKI

SEQ ID NO: 46513 - protein, 10 aa, synthetic construct
AAWENYYKKI

SEQ ID NO: 46514 - protein, 12 aa, synthetic construct
AAGGNTPGWFKI

SEQ ID NO: 46515 - protein, 11 aa, synthetic construct
AACDPTGWFKI

SEQ ID NO: 46516 - protein, 12 aa, synthetic construct
AAWDYTTCWFKI

SEQ ID NO: 46517 - protein, 10 aa, synthetic construct
AAGFTGWFKI

SEQ ID NO: 46518 - protein, 12 aa, synthetic construct
AAGGDTTGWFKI

SEQ ID NO: 46519 - protein, 17 aa, synthetic construct
LRGILYHWLVQDIIRNS

SEQ ID NO: 46520 - protein, 11 aa, synthetic construct
LRGIISLVGSR

SEQ ID NO: 46521 - protein, 10 aa, synthetic construct
AAGGGYYKKL

SEQ ID NO: 46522 - protein, 12 aa, synthetic construct
AAWDYTNGWFKI

SEQ ID NO: 46523 - protein, 11 aa, synthetic construct
ASWYTTGWFKI

SEQ ID NO: 46524 - protein, 12 aa, synthetic construct
AAWEYSTGWFKI

SEQ ID NO: 46525 - protein, 11 aa, synthetic construct
AAWDPTGWFKL

SEQ ID NO: 46526 - protein, 10 aa, synthetic construct
AAGASGWFKI

SEQ ID NO: 46527 - protein, 12 aa, synthetic construct
AAWAPTPGWFKI

SEQ ID NO: 46528 - protein, 11 aa, synthetic construct
AAWDTTGWFKR

SEQ ID NO: 46529 - protein, 13 aa, synthetic construct
AAWGGYTTGLFKI

SEQ ID NO: 46530 - protein, 13 aa, synthetic construct
AAWADDTTGWFKI

SEQ ID NO: 46531 - protein, 8 aa, synthetic construct
AAWARGKI

SEQ ID NO: 46532 - protein, 11 aa, synthetic construct
AAWDTTGGFKI

SEQ ID NO: 46533 - protein, 11 aa, synthetic construct
AAWDTTGCFKI

SEQ ID NO: 46534 - protein, 12 aa, synthetic construct
AAWACRGGWFKI

SEQ ID NO: 46535 - protein, 13 aa, synthetic construct
AAWACGTTGWFKI

SEQ ID NO: 46536 - protein, 7 aa, synthetic construct
AAWDTTG

SEQ ID NO: 46537 - protein, 11 aa, synthetic construct
AACETTGWFKI

SEQ ID NO: 46538 - protein, 12 aa, synthetic construct
AAWDWGTGWLKI

SEQ ID NO: 46539 - protein, 13 aa, synthetic construct
AAWDWNTTGWFKV

SEQ ID NO: 46540 - protein, 13 aa, synthetic construct
AAWGGYTTGWFKT

SEQ ID NO: 46541 - protein, 13 aa, synthetic construct
AAWGGYTTGWFRI

SEQ ID NO: 46542 - protein, 13 aa, synthetic construct
AAWARYTTGWFKI

SEQ ID NO: 46543 - protein, 11 aa, synthetic construct
AAWDTPGWFQI

SEQ ID NO: 46544 - protein, 13 aa, synthetic construct
AAWDWRAPGWFKI

SEQ ID NO: 46545 - protein, 12 aa, synthetic construct
AAWASGTGWFKI

SEQ ID NO: 46546 - protein, 12 aa, synthetic construct
ASWDYGTGWFKI

SEQ ID NO: 46547 - protein, 11 aa, synthetic construct
AAWGHPGWFKI

SEQ ID NO: 46548 - protein, 9 aa, synthetic construct
AAWGEYKKL

SEQ ID NO: 46549 - protein, 11 aa, synthetic construct
AAWAPTGWFKI

SEQ ID NO: 46550 - protein, 12 aa, synthetic construct
AAWADPTGWFKI

SEQ ID NO: 46551 - protein, 10 aa, synthetic construct
AASPTGWFKI

SEQ ID NO: 46552 - protein, 13 aa, synthetic construct
AAWDWDTTGWFRI

SEQ ID NO: 46553 - protein, 9 aa, synthetic construct
AACGGWFKI

SEQ ID NO: 46554 - protein, 9 aa, synthetic construct
AAWDVIEKL

SEQ ID NO: 46555 - protein, 12 aa, synthetic construct
AAWDWATGWLKI

SEQ ID NO: 46556 - protein, 10 aa, synthetic construct
AAWDWCYKKL

SEQ ID NO: 46557 - protein, 12 aa, synthetic construct
AAWAHTPGWFKI

SEQ ID NO: 46558 - protein, 9 aa, synthetic construct
ALTTGWSKI

SEQ ID NO: 46559 - protein, 13 aa, synthetic construct
AAWDVDTTGWFKI

SEQ ID NO: 46560 - protein, 13 aa, synthetic construct
AAWGGRGTGWLKI

SEQ ID NO: 46561 - protein, 12 aa, synthetic construct
AAWAHPTGWFKI

SEQ ID NO: 46562 - protein, 14 aa, synthetic construct
AAWALPHTTGWFKI

SEQ ID NO: 46563 - protein, 9 aa, synthetic construct
AAWAGWFKI

SEQ ID NO: 46564 - protein, 12 aa, synthetic construct
AAWDWGTGWFKM

SEQ ID NO: 46565 - protein, 9 aa, synthetic construct
AAWGGRFKI

SEQ ID NO: 46566 - protein, 12 aa, synthetic construct
AAWANNTGWFNI

SEQ ID NO: 46567 - protein, 11 aa, synthetic construct
AAWDTTGWLRI

SEQ ID NO: 46568 - protein, 13 aa, synthetic construct
AAWGGFTTGWFKI

SEQ ID NO: 46569 - protein, 11 aa, synthetic construct
AAWDTTGWIKI

SEQ ID NO: 46570 - protein, 12 aa, synthetic construct
AAWADTPGWFKI

SEQ ID NO: 46571 - skipped

SEQ ID NO: 46572 - protein, 12 aa, synthetic construct
AAWAPPTGWFKI

SEQ ID NO: 46573 - protein, 11 aa, synthetic construct
AAWDTTGWFQI

SEQ ID NO: 46574 - protein, 11 aa, synthetic construct
AAGASNYYKKL

SEQ ID NO: 46575 - protein, 11 aa, synthetic construct
AAVCTTGWFKI

SEQ ID NO: 46576 - protein, 13 aa, synthetic construct
AAWDWNTAGWFKI

SEQ ID NO: 46577 - protein, 12 aa, synthetic construct
AAWDWTTGLFKI

SEQ ID NO: 46578 - protein, 10 aa, synthetic construct
AGIFTGWFKI

SEQ ID NO: 46579 - protein, 12 aa, synthetic construct
AAWDWTTGRFKI

SEQ ID NO: 46580 - protein, 10 aa, synthetic construct
AACGTGWFKI

SEQ ID NO: 46581 - protein, 12 aa, synthetic construct
AAWDWTTGWFNI

SEQ ID NO: 46582 - protein, 12 aa, synthetic construct
AAWDWTTGWFRI

SEQ ID NO: 46583 - protein, 10 aa, synthetic construct
AFYTTGWLKI

SEQ ID NO: 46584 - protein, 11 aa, synthetic construct
AAWDWTGWFKV

SEQ ID NO: 46585 - protein, 12 aa, synthetic construct
AASIDTTGWSKI

SEQ ID NO: 46586 - protein, 8 aa, synthetic construct
ASWGWFNI

SEQ ID NO: 46587 - protein, 6 aa, synthetic construct
TGWFKI

SEQ ID NO: 46588 - protein, 15 aa, synthetic construct
AARVPEGYTTGWFKI

SEQ ID NO: 46589 - protein, 12 aa, synthetic construct
AAWGHTTGWFEI

SEQ ID NO: 46590 - protein, 10 aa, synthetic construct
ASWGTGWFKI

SEQ ID NO: 46591 - protein, 12 aa, synthetic construct
AAWGHTTGWFNI

SEQ ID NO: 46592 - protein, 12 aa, synthetic construct
AAWERATGWFKI

SEQ ID NO: 46593 - protein, 13 aa, synthetic construct
AAWGTYTTGWFKM

SEQ ID NO: 46594 - protein, 10 aa, synthetic construct
AAWGTGWLQI

SEQ ID NO: 46595 - protein, 13 aa, synthetic construct
AAWGTYTTGLFKI

SEQ ID NO: 46596 - protein, 11 aa, synthetic construct
YAGYTSGLFKI

SEQ ID NO: 46597 - protein, 12 aa, synthetic construct
AAWGLATGWFKM

SEQ ID NO: 46598 - protein, 9 aa, synthetic construct
AAWEGWFKV

SEQ ID NO: 46599 - protein, 9 aa, synthetic construct
AAWGGWVKI

SEQ ID NO: 46600 - protein, 13 aa, synthetic construct
AAWGTYTTGWFMI

SEQ ID NO: 46601 - protein, 10 aa, synthetic construct
AAWGTGWLNI

SEQ ID NO: 46602 - protein, 12 aa, synthetic construct
AAWERDTGWFKI

SEQ ID NO: 46603 - protein, 12 aa, synthetic construct
AAWERDTGWFNI

SEQ ID NO: 46604 - protein, 11 aa, synthetic construct
AAWGTKGWFKK

SEQ ID NO: 46605 - protein, 11 aa, synthetic construct
AAWEPTGWLKK

SEQ ID NO: 46606 - protein, 12 aa, synthetic construct
AAWGVTIGWFKI

SEQ ID NO: 46607 - protein, 11 aa, synthetic construct
AAWEPTGWFKR

SEQ ID NO: 46608 - protein, 10 aa, synthetic construct
AAWENYYNKL

SEQ ID NO: 46609 - protein, 13 aa, synthetic construct
AAWEPNTTRLSKI

SEQ ID NO: 46610 - protein, 14 aa, synthetic construct
AAWEPLYTTGGFEF

SEQ ID NO: 46611 - protein, 11 aa, synthetic construct
AAWEPDYYKKL

SEQ ID NO: 46612 - protein, 15 aa, synthetic construct
AAWERKGYTTDWFKI

SEQ ID NO: 46613 - protein, 12 aa, synthetic construct
AAWGHTTGWFKM

SEQ ID NO: 46614 - protein, 13 aa, synthetic construct
AAWGGYATGWLKI

SEQ ID NO: 46615 - protein, 13 aa, synthetic construct
AAWEPDTTGWFKI

SEQ ID NO: 46616 - protein, 9 aa, synthetic construct
SSWDNYKKL

SEQ ID NO: 46617 - protein, 5 aa, synthetic construct
AAWEP

SEQ ID NO: 46618 - protein, 13 aa, synthetic construct
AAWGTYTTGLLKI

SEQ ID NO: 46619 - protein, 13 aa, synthetic construct
AAWGTHTTGRFKI

SEQ ID NO: 46620 - protein, 13 aa, synthetic construct
AAWGKYTTGWFKT

SEQ ID NO: 46621 - protein, 13 aa, synthetic construct
AAWGKYTTGWFKI

SEQ ID NO: 46622 - protein, 9 aa, synthetic construct
AAWGTGWLR

SEQ ID NO: 46623 - protein, 10 aa, synthetic construct
AAWEHYYKKL

SEQ ID NO: 46624 - protein, 9 aa, synthetic construct
AAWGGWFQI

SEQ ID NO: 46625 - protein, 12 aa, synthetic construct
AAWGHTTGWFKL

SEQ ID NO: 46626 - protein, 13 aa, synthetic construct
AAWESDTTGWFKI

SEQ ID NO: 46627 - protein, 12 aa, synthetic construct
AAWGVHTGWFRI

SEQ ID NO: 46628 - protein, 13 aa, synthetic construct
AAWESEATGGVKI

SEQ ID NO: 46629 - protein, 14 aa, synthetic construct
AAWESGGNTGWFKI

SEQ ID NO: 46630 - protein, 13 aa, synthetic construct
AAWEGSTTGGVTI

SEQ ID NO: 46631 - protein, 13 aa, synthetic construct
AAWESHTTGWFKI

SEQ ID NO: 46632 - protein, 12 aa, synthetic construct
AAWGGTTGWFNI

SEQ ID NO: 46633 - protein, 15 aa, synthetic construct
AAWESKGCSTGWFKI

SEQ ID NO: 46634 - protein, 15 aa, synthetic construct
AAWERKGYTTGWFKV

SEQ ID NO: 46635 - protein, 13 aa, synthetic construct
AAWEGNTTSWFKI

SEQ ID NO: 46636 - protein, 13 aa, synthetic construct
AAWESNTTGLFKI

SEQ ID NO: 46637 - protein, 14 aa, synthetic construct
AAWGLEDTTGWFKI

SEQ ID NO: 46638 - protein, 12 aa, synthetic construct
AAWGVNTGWLKI

SEQ ID NO: 46639 - protein, 10 aa, synthetic construct
AAWGTGWCKI

SEQ ID NO: 46640 - protein, 11 aa, synthetic construct
AAWESNYYKKL

SEQ ID NO: 46641 - protein, 10 aa, synthetic construct
AAWGTGWAKI

SEQ ID NO: 46642 - protein, 13 aa, synthetic construct
AAWESDATGWFKI

SEQ ID NO: 46643 - protein, 12 aa, synthetic construct
AAWGHTTGWCKI

SEQ ID NO: 46644 - protein, 10 aa, synthetic construct
VAWDWDYKKL

SEQ ID NO: 46645 - protein, 12 aa, synthetic construct
AAWGLATGWSKI

SEQ ID NO: 46646 - protein, 13 aa, synthetic construct
AAWENYTTGWFKI

SEQ ID NO: 46647 - protein, 9 aa, synthetic construct
AAWGGWFNI

SEQ ID NO: 46648 - protein, 9 aa, synthetic construct
AAWGGWFKV

SEQ ID NO: 46649 - protein, 9 aa, synthetic construct
AAWGGWFKT

SEQ ID NO: 46650 - protein, 15 aa, synthetic construct
AAWERKGYTTGWSKI

SEQ ID NO: 46651 - protein, 15 aa, synthetic construct
AAWERKGYTTGWVKI

SEQ ID NO: 46652 - protein, 10 aa, synthetic construct
AAWGTGWFTI

SEQ ID NO: 46653 - protein, 11 aa, synthetic construct
TAWGTTGWLKI

SEQ ID NO: 46654 - protein, 9 aa, synthetic construct
AAWERYKKL

SEQ ID NO: 46655 - protein, 12 aa, synthetic construct
AAWGLATGWLKK

SEQ ID NO: 46656 - protein, 13 aa, synthetic construct
AAWERYTTGWFKI

SEQ ID NO: 46657 - protein, 12 aa, synthetic construct
AAWEGTTGWFRI

SEQ ID NO: 46658 - protein, 12 aa, synthetic construct
AAWGGTTGWVKI

SEQ ID NO: 46659 - protein, 12 aa, synthetic construct
AAWGHTTGRVTI

SEQ ID NO: 46660 - protein, 10 aa, synthetic construct
AAWGVGWFKI

SEQ ID NO: 46661 - protein, 13 aa, synthetic construct
AAWGTYTKGWFKI

SEQ ID NO: 46662 - protein, 12 aa, synthetic construct
AAWGKTTGWFKI

SEQ ID NO: 46663 - protein, 9 aa, synthetic construct
AAWEGWFNI

SEQ ID NO: 46664 - protein, 13 aa, synthetic construct
TAWALYTTGWFKI

SEQ ID NO: 46665 - protein, 14 aa, synthetic construct
AAWELPHTTGWFKI

SEQ ID NO: 46666 - protein, 11 aa, synthetic construct
AAWGHTCWFKI

SEQ ID NO: 46667 - protein, 12 aa, synthetic construct
AAWGHATGWFKI

SEQ ID NO: 46668 - protein, 12 aa, synthetic construct
AAWGHTPGWFKI

SEQ ID NO: 46669 - protein, 11 aa, synthetic construct
AAWGTTGRFKI

SEQ ID NO: 46670 - protein, 10 aa, synthetic construct
AAWGGYYMKL

SEQ ID NO: 46671 - protein, 12 aa, synthetic construct
AAWGISTGWFKI

SEQ ID NO: 46672 - protein, 10 aa, synthetic construct
AAWENGWLKI

SEQ ID NO: 46673 - protein, 9 aa, synthetic construct
AAWENYNKI

SEQ ID NO: 46674 - protein, 11 aa, synthetic construct
AAWENKGWFKI

SEQ ID NO: 46675 - protein, 12 aa, synthetic construct
AAWGITAGWFKI

SEQ ID NO: 46676 - protein, 11 aa, synthetic construct
AAWENKGWIKK

SEQ ID NO: 46677 - protein, 13 aa, synthetic construct
AAWEGYTTGLFKI

SEQ ID NO: 46678 - protein, 13 aa, synthetic construct
AAWEGYTPGWFKI

SEQ ID NO: 46679 - protein, 13 aa, synthetic construct
AAWEGYTHGWFKI

SEQ ID NO: 46680 - protein, 11 aa, synthetic construct
AAWENPGLFKI

SEQ ID NO: 46681 - protein, 10 aa, synthetic construct
AAWGHCWFNI

SEQ ID NO: 46682 - protein, 10 aa, synthetic construct
AAWGTTGWFK

SEQ ID NO: 46683 - protein, 13 aa, synthetic construct
AAWGHYTPGWFKI

SEQ ID NO: 46684 - protein, 7 aa, synthetic construct
STCWLKI

SEQ ID NO: 46685 - protein, 12 aa, synthetic construct
AAWGHTTGWSKI

SEQ ID NO: 46686 - protein, 12 aa, synthetic construct
AAWEKNKGWLKI

SEQ ID NO: 46687 - protein, 11 aa, synthetic construct
AAWGTTGWFKV

SEQ ID NO: 46688 - protein, 12 aa, synthetic construct
AAWEHTTGWFQI

SEQ ID NO: 46689 - protein, 12 aa, synthetic construct
AAWGHPTGWVQI

SEQ ID NO: 46690 - protein, 12 aa, synthetic construct
AAWEKTTGWLKI

SEQ ID NO: 46691 - protein, 10 aa, synthetic construct
AAWEKYYKKH

SEQ ID NO: 46692 - protein, 10 aa, synthetic construct
AAWEKYYKKL

SEQ ID NO: 46693 - protein, 13 aa, synthetic construct
AAWELDTTGWFKI

SEQ ID NO: 46694 - protein, 14 aa, synthetic construct
AAWELEDTTGWFKI

SEQ ID NO: 46695 - protein, 13 aa, synthetic construct
AAWEGYTTGWLKI

SEQ ID NO: 46696 - protein, 11 aa, synthetic construct
AAWGTTGWIKI

SEQ ID NO: 46697 - protein, 4 aa, synthetic construct
WFNI

SEQ ID NO: 46698 - protein, 10 aa, synthetic construct
AAWELGYKKL

SEQ ID NO: 46699 - protein, 11 aa, synthetic construct
AAWGHLYYNKL

SEQ ID NO: 46700 - protein, 4 aa, synthetic construct
WLKI

SEQ ID NO: 46701 - protein, 11 aa, synthetic construct
AAWENTCWFKI

SEQ ID NO: 46702 - protein, 11 aa, synthetic construct
AAWGITGWFKI

SEQ ID NO: 46703 - protein, 11 aa, synthetic construct
AAWENTGWVKI

SEQ ID NO: 46704 - protein, 8 aa, synthetic construct
AAWENTTG

SEQ ID NO: 46705 - protein, 12 aa, synthetic construct
VAWGDTTGWFKI

SEQ ID NO: 46706 - protein, 13 aa, synthetic construct
AAWGGYNTGWFKI

SEQ ID NO: 46707 - protein, 14 aa, synthetic construct
AAWGKDGTTGWFKI

SEQ ID NO: 46708 - protein, 12 aa, synthetic construct
AAWENTTGWSKI

SEQ ID NO: 46709 - protein, 11 aa, synthetic construct
TAWGTTGWFKI

SEQ ID NO: 46710 - protein, 10 aa, synthetic construct
AAWGKGWFNI

SEQ ID NO: 46711 - protein, 12 aa, synthetic construct
AAWGHTTGWLKI

SEQ ID NO: 46712 - protein, 9 aa, synthetic construct
AAWENYKKH

SEQ ID NO: 46713 - protein, 12 aa, synthetic construct
AAWGHTTGRVKI

SEQ ID NO: 46714 - protein, 11 aa, synthetic construct
AAWGTSGWFKI

SEQ ID NO: 46715 - protein, 10 aa, synthetic construct
AAWGGYCKKL

SEQ ID NO: 46716 - protein, 11 aa, synthetic construct
AAWEKNGWFKI

SEQ ID NO: 46717 - protein, 9 aa, synthetic construct
AAWEGWFRI

SEQ ID NO: 46718 - protein, 10 aa, synthetic construct
VAWETGWFKI

SEQ ID NO: 46719 - protein, 12 aa, synthetic construct
AAWENTPGWFKI

SEQ ID NO: 46720 - protein, 12 aa, synthetic construct
SSWGVTTGWFKI

SEQ ID NO: 46721 - protein, 12 aa, synthetic construct
AAWGITPGWFKI

SEQ ID NO: 46722 - protein, 12 aa, synthetic construct
AAWGITTGWSKI

SEQ ID NO: 46723 - skipped

SEQ ID NO: 46724 - protein, 12 aa, synthetic construct
AAWGITTGGFKI

SEQ ID NO: 46725 - protein, 10 aa, synthetic construct
VAWVTGWFKI

SEQ ID NO: 46726 - protein, 11 aa, synthetic construct
AAWGTTGGFKI

SEQ ID NO: 46727 - protein, 7 aa, synthetic construct
AAWGTTG

SEQ ID NO: 46728 - protein, 12 aa, synthetic construct
AAWGHTTGGFKI

SEQ ID NO: 46729 - protein, 12 aa, synthetic construct
TAWENTTGWFKI

SEQ ID NO: 46730 - protein, 11 aa, synthetic construct
AAWESPYYKKL

SEQ ID NO: 46731 - protein, 13 aa, synthetic construct
AAWGTYNTGWFKI

SEQ ID NO: 46732 - protein, 13 aa, synthetic construct
VAWGPYTTGWVKI

SEQ ID NO: 46733 - protein, 13 aa, synthetic construct
AAWGGYTTGWFEI

SEQ ID NO: 46734 - protein, 11 aa, synthetic construct
AAWENTGWFKL

SEQ ID NO: 46735 - protein, 12 aa, synthetic construct
AAWGITTGWFKV

SEQ ID NO: 46736 - protein, 11 aa, synthetic construct
AAWENTGWFKV

SEQ ID NO: 46737 - protein, 13 aa, synthetic construct
AAWGGYTTGRFKI

SEQ ID NO: 46738 - protein, 7 aa, synthetic construct
AAWGTGW

SEQ ID NO: 46739 - protein, 14 aa, synthetic construct
TAWDSGGNTGWFKI

SEQ ID NO: 46740 - protein, 11 aa, synthetic construct
AAWESTGWFKI

SEQ ID NO: 46741 - protein, 14 aa, synthetic construct
AAWGPLYTTGWFKI

SEQ ID NO: 46742 - protein, 11 aa, synthetic construct
AAWGPTGRFKI

SEQ ID NO: 46743 - protein, 13 aa, synthetic construct
AAWEYVTTGWFKI

SEQ ID NO: 46744 - protein, 9 aa, synthetic construct
AAWEYWFKI

SEQ ID NO: 46745 - protein, 9 aa, synthetic construct
AAWEYYKKI

SEQ ID NO: 46746 - protein, 9 aa, synthetic construct
AAWEYYNKL

SEQ ID NO: 46747 - protein, 10 aa, synthetic construct
AAWFAGWFKI

SEQ ID NO: 46748 - protein, 10 aa, synthetic construct
AAWGPSWFKV

SEQ ID NO: 46749 - protein, 10 aa, synthetic construct
AAWGFGWLKI

SEQ ID NO: 46750 - protein, 10 aa, synthetic construct
AAWGFGWFKI

SEQ ID NO: 46751 - protein, 13 aa, synthetic construct
AAWGFGTPGWFKI

SEQ ID NO: 46752 - protein, 15 aa, synthetic construct
AAWGPSLYTPGLFKI

SEQ ID NO: 46753 - protein, 12 aa, synthetic construct
AAWGNTTGWFKM

SEQ ID NO: 46754 - protein, 13 aa, synthetic construct
AAWGEYTTGWLKI

SEQ ID NO: 46755 - protein, 11 aa, synthetic construct
AAWGPSGWFKI

SEQ ID NO: 46756 - protein, 6 aa, synthetic construct
AAWFKI

SEQ ID NO: 46757 - protein, 12 aa, synthetic construct
AAWGETTGLVKI

SEQ ID NO: 46758 - protein, 13 aa, synthetic construct
AAWGDYTTGWFNI

SEQ ID NO: 46759 - protein, 11 aa, synthetic construct
AAWGPPGWFKI

SEQ ID NO: 46760 - protein, 10 aa, synthetic construct
AAWFTGWFKT

SEQ ID NO: 46761 - protein, 12 aa, synthetic construct
AAWGFTSGWFML

SEQ ID NO: 46762 - protein, 12 aa, synthetic construct
AAWGNTTGLLKI

SEQ ID NO: 46763 - protein, 12 aa, synthetic construct
AAWGFTTGWFKI

SEQ ID NO: 46764 - protein, 11 aa, synthetic construct
AAWGPTGWVTI

SEQ ID NO: 46765 - protein, 12 aa, synthetic construct
AAWEYTNGWFKI

SEQ ID NO: 46766 - protein, 12 aa, synthetic construct
AAWEYTPGWFKI

SEQ ID NO: 46767 - protein, 9 aa, synthetic construct
AAWGFWFKI

SEQ ID NO: 46768 - protein, 9 aa, synthetic construct
AAWGPYEKL

SEQ ID NO: 46769 - protein, 12 aa, synthetic construct
AAWEYTTGLFKI

SEQ ID NO: 46770 - protein, 12 aa, synthetic construct
AAWEYTTGRFKI

SEQ ID NO: 46771 - protein, 11 aa, synthetic construct
VASDTTGWFKI

SEQ ID NO: 46772 - protein, 11 aa, synthetic construct
VARGATGWFKI

SEQ ID NO: 46773 - protein, 12 aa, synthetic construct
AAWEYTTGWFKL

SEQ ID NO: 46774 - protein, 12 aa, synthetic construct
AAWGNTSGWFKI

SEQ ID NO: 46775 - protein, 11 aa, synthetic construct
AAWGPTGWVKI

SEQ ID NO: 46776 - protein, 12 aa, synthetic construct
AAWEYTTGWFKT

SEQ ID NO: 46777 - protein, 12 aa, synthetic construct
AAWEYTTGWIKI

SEQ ID NO: 46778 - protein, 9 aa, synthetic construct
TAWDYWFKI

SEQ ID NO: 46779 - protein, 12 aa, synthetic construct
TAWDNTTGWFKI

SEQ ID NO: 46780 - protein, 11 aa, synthetic construct
AAWGNTGWFKI

SEQ ID NO: 46781 - protein, 12 aa, synthetic construct
AAWEYTTGWVKI

SEQ ID NO: 46782 - protein, 14 aa, synthetic construct
AAWEYTYTTGWFKI

SEQ ID NO: 46783 - protein, 13 aa, synthetic construct
VAGGHYTTGWFKI

SEQ ID NO: 46784 - protein, 6 aa, synthetic construct
AAWGPL

SEQ ID NO: 46785 - protein, 12 aa, synthetic construct
TAWDLGPGWFKI

SEQ ID NO: 46786 - protein, 12 aa, synthetic construct
AAWGDTTGWYKI

SEQ ID NO: 46787 - protein, 13 aa, synthetic construct
AAWGNYSTGWFKI

SEQ ID NO: 46788 - protein, 11 aa, synthetic construct
AAWGPAGWFKI

SEQ ID NO: 46789 - protein, 12 aa, synthetic construct
AAWGATTGWFNI

SEQ ID NO: 46790 - protein, 12 aa, synthetic construct
AAWGDNTGWVKI

SEQ ID NO: 46791 - protein, 10 aa, synthetic construct
AAWGNYYNKI

SEQ ID NO: 46792 - protein, 12 aa, synthetic construct
AAWGDNTGWFKT

SEQ ID NO: 46793 - protein, 13 aa, synthetic construct
AAWGAYTTGLFKI

SEQ ID NO: 46794 - protein, 12 aa, synthetic construct
AAWGDNTGWFKI

SEQ ID NO: 46795 - protein, 13 aa, synthetic construct
AAWGNYTTGLFKI

SEQ ID NO: 46796 - protein, 10 aa, synthetic construct
AAWGNYYKKI

SEQ ID NO: 46797 - protein, 12 aa, synthetic construct
AAWGCATGWFKI

SEQ ID NO: 46798 - protein, 13 aa, synthetic construct
AAWGDDTTGWFKI

SEQ ID NO: 46799 - protein, 12 aa, synthetic construct
AAWGCATGWVEI

SEQ ID NO: 46800 - protein, 10 aa, synthetic construct
AAWGNYYKIL

SEQ ID NO: 46801 - protein, 10 aa, synthetic construct
TNNTTGLFKI

SEQ ID NO: 46802 - protein, 11 aa, synthetic construct
AAWGCTGWFKI

SEQ ID NO: 46803 - protein, 12 aa, synthetic construct
AAWGDATGWFKI

SEQ ID NO: 46804 - protein, 13 aa, synthetic construct
AAWGNYTTGWVKI

SEQ ID NO: 46805 - protein, 13 aa, synthetic construct
AAWGNYTTGWIKI

SEQ ID NO: 46806 - protein, 12 aa, synthetic construct
AAWGDTNGCFKI

SEQ ID NO: 46807 - protein, 12 aa, synthetic construct
AAWGDTPGWFKI

SEQ ID NO: 46808 - protein, 10 aa, synthetic construct
AAWGAGWYKI

SEQ ID NO: 46809 - protein, 10 aa, synthetic construct
AAWGPGWFTI

SEQ ID NO: 46810 - protein, 12 aa, synthetic construct
AAWGDTTGWVKI

SEQ ID NO: 46811 - protein, 11 aa, synthetic construct
AAWGPHGWFKI

SEQ ID NO: 46812 - protein, 10 aa, synthetic construct
AAWFTGWFNI

SEQ ID NO: 46813 - protein, 12 aa, synthetic construct
AAWGDTTGWFRI

SEQ ID NO: 46814 - protein, 10 aa, synthetic construct
AAWFTGWFRI

SEQ ID NO: 46815 - protein, 10 aa, synthetic construct
TNNTTGWFKI

SEQ ID NO: 46816 - protein, 13 aa, synthetic construct
TAWDQYTTGWFKI

SEQ ID NO: 46817 - protein, 12 aa, synthetic construct
AAWGDTTGWFKV

SEQ ID NO: 46818 - protein, 10 aa, synthetic construct
AAWGPGWFRI

SEQ ID NO: 46819 - protein, 10 aa, synthetic construct
AAWGPGGFKI

SEQ ID NO: 46820 - protein, 10 aa, synthetic construct
AAWGPGWFNI

SEQ ID NO: 46821 - protein, 10 aa, synthetic construct
AAWGPGWFKL

SEQ ID NO: 46822 - protein, 7 aa, synthetic construct
AAWGNYK

SEQ ID NO: 46823 - protein, 12 aa, synthetic construct
AAWGDTTGLFKI

SEQ ID NO: 46824 - protein, 11 aa, synthetic construct
AAWGNYNTGWF

SEQ ID NO: 46825 - protein, 10 aa, synthetic construct
AAWGPGWCKI

SEQ ID NO: 46826 - protein, 10 aa, synthetic construct
AAWFTSWFKI

SEQ ID NO: 46827 - protein, 14 aa, synthetic construct
AAWGAGATTGWFKI

SEQ ID NO: 46828 - protein, 9 aa, synthetic construct
AAWGFYKKL

SEQ ID NO: 46829 - protein, 9 aa, synthetic construct
AAWGPYKKI

SEQ ID NO: 46830 - protein, 12 aa, synthetic construct
AAWGGTTGWFKV

SEQ ID NO: 46831 - protein, 9 aa, synthetic construct
AAWGGGFKI

SEQ ID NO: 46832 - protein, 9 aa, synthetic construct
AAWGSYKKL

SEQ ID NO: 46833 - protein, 14 aa, synthetic construct
AAWGLGIATGWLKI

SEQ ID NO: 46834 - protein, 11 aa, synthetic construct
AAWETTCWFKI

SEQ ID NO: 46835 - protein, 7 aa, synthetic construct
AAWETTG

SEQ ID NO: 46836 - protein, 11 aa, synthetic construct
AAWETTGLFKI

SEQ ID NO: 46837 - protein, 11 aa, synthetic construct
AAWGSNYYKKL

SEQ ID NO: 46838 - protein, 12 aa, synthetic construct
AAWGSNTGWFKI

SEQ ID NO: 46839 - protein, 11 aa, synthetic construct
AAWETTGWFKR

SEQ ID NO: 46840 - protein, 10 aa, synthetic construct
TAWITGWFKI

SEQ ID NO: 46841 - protein, 11 aa, synthetic construct
AAWETTGWFKV

SEQ ID NO: 46842 - protein, 11 aa, synthetic construct
AAWETTGWFQI

SEQ ID NO: 46843 - protein, 12 aa, synthetic construct
AAWGSGTGWFKI

SEQ ID NO: 46844 - protein, 12 aa, synthetic construct
AAWGLGPGWFKI

SEQ ID NO: 46845 - protein, 13 aa, synthetic construct
AAWGSDTTGWFKI

SEQ ID NO: 46846 - protein, 13 aa, synthetic construct
AAWGGNTAGWFKI

SEQ ID NO: 46847 - protein, 12 aa, synthetic construct
VAWDFTTGWFKI

SEQ ID NO: 46848 - protein, 12 aa, synthetic construct
AAWGSATGWFKI

SEQ ID NO: 46849 - protein, 13 aa, synthetic construct
AAWGRYTTGWFKI

SEQ ID NO: 46850 - protein, 10 aa, synthetic construct
AAWGGGWCKI

SEQ ID NO: 46851 - protein, 11 aa, synthetic construct
AAWETSGWFKI

SEQ ID NO: 46852 - protein, 13 aa, synthetic construct
VAWDSGATGWFKI

SEQ ID NO: 46853 - protein, 11 aa, synthetic construct
AAWETNGWFKI

SEQ ID NO: 46854 - protein, 8 aa, synthetic construct
AAWGLFKI

SEQ ID NO: 46855 - protein, 12 aa, synthetic construct
AAWGGTTGWFEI

SEQ ID NO: 46856 - protein, 10 aa, synthetic construct
AAWGTGLLKI

SEQ ID NO: 46857 - protein, 14 aa, synthetic construct
AAWETDCTTGWLKI

SEQ ID NO: 46858 - protein, 10 aa, synthetic construct
AAWETDYKKL

SEQ ID NO: 46859 - protein, 12 aa, synthetic construct
AAWGGTTGGLNI

SEQ ID NO: 46860 - protein, 13 aa, synthetic construct
VAWDSHTTGWFKI

SEQ ID NO: 46861 - protein, 10 aa, synthetic construct
AAWETGRFKI

SEQ ID NO: 46862 - protein, 10 aa, synthetic construct
AAWGTGGFKI

SEQ ID NO: 46863 - protein, 12 aa, synthetic construct
AAWGGTNCWLKI

SEQ ID NO: 46864 - protein, 13 aa, synthetic construct
AAWGGRGTGWFNI

SEQ ID NO: 46865 - protein, 10 aa, synthetic construct
AAWETGWFKL

SEQ ID NO: 46866 - protein, 13 aa, synthetic construct
AAWGNYTTGWFKT

SEQ ID NO: 46867 - protein, 13 aa, synthetic construct
AAWGTDTTGWFKI

SEQ ID NO: 46868 - protein, 10 aa, synthetic construct
AAWGTCWFNI

SEQ ID NO: 46869 - protein, 10 aa, synthetic construct
AAWETGWFKR

SEQ ID NO: 46870 - protein, 10 aa, synthetic construct
AAWGSYYKKL

SEQ ID NO: 46871 - protein, 9 aa, synthetic construct
AAWGLFKKL

SEQ ID NO: 46872 - protein, 13 aa, synthetic construct
AAWGGRGTGWFTI

SEQ ID NO: 46873 - protein, 10 aa, synthetic construct
AAWETYYKKL

SEQ ID NO: 46874 - protein, 9 aa, synthetic construct
AAWEVFKKL

SEQ ID NO: 46875 - protein, 9 aa, synthetic construct
AAWGGCFKL

SEQ ID NO: 46876 - protein, 9 aa, synthetic construct
AAWEVWFKI

SEQ ID NO: 46877 - protein, 9 aa, synthetic construct
TAWDEYKKL

SEQ ID NO: 46878 - protein, 10 aa, synthetic construct
AAWGNCYKKL

SEQ ID NO: 46879 - protein, 13 aa, synthetic construct
AAWGGDTTGWFEI

SEQ ID NO: 46880 - protein, 13 aa, synthetic construct
AAWGGDTTGLFKI

SEQ ID NO: 46881 - protein, 12 aa, synthetic construct
AAWEYITGWVKI

SEQ ID NO: 46882 - protein, 9 aa, synthetic construct
AAWGRCKKL

SEQ ID NO: 46883 - protein, 8 aa, synthetic construct
AAWEYKKL

SEQ ID NO: 46884 - protein, 12 aa, synthetic construct
AAWEYMFGWFKI

SEQ ID NO: 46885 - protein, 13 aa, synthetic construct
AAWEYNAAGGFKI

SEQ ID NO: 46886 - protein, 12 aa, synthetic construct
VAWDCTTGWFKI

SEQ ID NO: 46887 - protein, 12 aa, synthetic construct
AAWEYNTCCFNI

SEQ ID NO: 46888 - protein, 10 aa, synthetic construct
AAWGNGWFKI

SEQ ID NO: 46889 - protein, 14 aa, synthetic construct
TAWDLEDTTGWFKI

SEQ ID NO: 46890 - protein, 13 aa, synthetic construct
AAWGGDTAGWFKI

SEQ ID NO: 46891 - protein, 13 aa, synthetic construct
AAWGPYTTGLLKT

SEQ ID NO: 46892 - protein, 12 aa, synthetic construct
AAWEYNTGWFNI

SEQ ID NO: 46893 - protein, 12 aa, synthetic construct
AAWEYPTGWFEI

SEQ ID NO: 46894 - protein, 13 aa, synthetic construct
AAWGGDATGWFKI

SEQ ID NO: 46895 - protein, 13 aa, synthetic construct
AAWEYRAPGWFKI

SEQ ID NO: 46896 - protein, 11 aa, synthetic construct
AAWEYHCWFKI

SEQ ID NO: 46897 - protein, 11 aa, synthetic construct
AAWEYEGWFKI

SEQ ID NO: 46898 - protein, 13 aa, synthetic construct
AAWGGDTTGWFRI

SEQ ID NO: 46899 - protein, 13 aa, synthetic construct
AAWEWDTTGWFKI

SEQ ID NO: 46900 - protein, 12 aa, synthetic construct
AAWGLGTGWFKI

SEQ ID NO: 46901 - protein, 10 aa, synthetic construct
TAWVTGWFKK

SEQ ID NO: 46902 - protein, 9 aa, synthetic construct
AAWGRYRKL

SEQ ID NO: 46903 - protein, 10 aa, synthetic construct
AAWGGDYKKL

SEQ ID NO: 46904 - protein, 12 aa, synthetic construct
AAWEWATGWFKI

SEQ ID NO: 46905 - protein, 9 aa, synthetic construct
AAWGRWFKI

SEQ ID NO: 46906 - protein, 10 aa, synthetic construct
AAWGGDYKKI

SEQ ID NO: 46907 - protein, 12 aa, synthetic construct
TAWDCTTGWFKI

SEQ ID NO: 46908 - protein, 10 aa, synthetic construct
TFYTTGWFKK

SEQ ID NO: 46909 - protein, 11 aa, synthetic construct
AAWEYDYYKKL

SEQ ID NO: 46910 - protein, 12 aa, synthetic construct
AAWGRTTVWLKI

SEQ ID NO: 46911 - protein, 8 aa, synthetic construct
AAWEWFKI

SEQ ID NO: 46912 - protein, 8 aa, synthetic construct
AAWEWFNI

SEQ ID NO: 46913 - protein, 12 aa, synthetic construct
AAWEWGTGWFKI

SEQ ID NO: 46914 - protein, 13 aa, synthetic construct
AAWGGDTTGWLNI

SEQ ID NO: 46915 - protein, 9 aa, synthetic construct
AAWGRLFKI

SEQ ID NO: 46916 - protein, 14 aa, synthetic construct
AAWGLPHTTGWLKI

SEQ ID NO: 46917 - protein, 13 aa, synthetic construct
AAWEWYTTGWFKI

SEQ ID NO: 46918 - protein, 10 aa, synthetic construct
AAWGTDWFKI

SEQ ID NO: 46919 - protein, 11 aa, synthetic construct
SAWDYAGLFKI

SEQ ID NO: 46920 - protein, 12 aa, synthetic construct
SSWDFTTGWFKI

SEQ ID NO: 46921 - protein, 10 aa, synthetic construct
DADTTGWFKI

SEQ ID NO: 46922 - protein, 12 aa, synthetic construct
SAWDYNTGWFKI

SEQ ID NO: 46923 - protein, 11 aa, synthetic construct
AVWYTTGWFKI

SEQ ID NO: 46924 - protein, 10 aa, synthetic construct
AVYTTGWFKI

SEQ ID NO: 46925 - protein, 10 aa, synthetic construct
AWLDYGWLKI

SEQ ID NO: 46926 - protein, 9 aa, synthetic construct
CWWDCLLKI

SEQ ID NO: 46927 - protein, 10 aa, synthetic construct
DACDNGWFKI

SEQ ID NO: 46928 - protein, 13 aa, synthetic construct
DACDPYTNGWLKI

SEQ ID NO: 46929 - protein, 10 aa, synthetic construct
DACWFVWFKI

SEQ ID NO: 46930 - protein, 10 aa, synthetic construct
DADNTGWFKK

SEQ ID NO: 46931 - protein, 11 aa, synthetic construct
DAEYTTGWFKI

SEQ ID NO: 46932 - protein, 11 aa, synthetic construct
DALGNTGWFKI

SEQ ID NO: 46933 - protein, 11 aa, synthetic construct
DAGDNTGWVKI

SEQ ID NO: 46934 - protein, 11 aa, synthetic construct
DAGDTNGWLKI

SEQ ID NO: 46935 - protein, 10 aa, synthetic construct
DAGGNFYKKK

SEQ ID NO: 46936 - protein, 10 aa, synthetic construct
DAGGNGWFYI

SEQ ID NO: 46937 - protein, 13 aa, synthetic construct
DAGGTYTTGCFKI

SEQ ID NO: 46938 - protein, 12 aa, synthetic construct
DAGGYTTGWFKI

SEQ ID NO: 46939 - protein, 10 aa, synthetic construct
DALDSDYKKL

SEQ ID NO: 46940 - protein, 8 aa, synthetic construct
SAWDYKKL

SEQ ID NO: 46941 - protein, 12 aa, synthetic construct
DALDYTTVWFKI

SEQ ID NO: 46942 - protein, 12 aa, synthetic construct
AVWVHTTGWFKI

SEQ ID NO: 46943 - protein, 12 aa, synthetic construct
AVWGYTTGWLKI

SEQ ID NO: 46944 - protein, 11 aa, synthetic construct
AVWGTTGWFKI

SEQ ID NO: 46945 - protein, 10 aa, synthetic construct
AVWGTGWFKI

SEQ ID NO: 46946 - protein, 11 aa, synthetic construct
AVGETTGWCKR

SEQ ID NO: 46947 - protein, 12 aa, synthetic construct
SAWDYPTGWFKI

SEQ ID NO: 46948 - protein, 11 aa, synthetic construct
AVGKTTGWFKI

SEQ ID NO: 46949 - protein, 10 aa, synthetic construct
AVNTTGWFKI

SEQ ID NO: 46950 - protein, 11 aa, synthetic construct
AVWATTGWFKI

SEQ ID NO: 46951 - protein, 11 aa, synthetic construct
AVWDATGWFKI

SEQ ID NO: 46952 - protein, 11 aa, synthetic construct
AVWDCTGWFKI

SEQ ID NO: 46953 - protein, 11 aa, synthetic construct
AVWDCTSWFKI

SEQ ID NO: 46954 - protein, 12 aa, synthetic construct
AVWDFATGWFKI

SEQ ID NO: 46955 - protein, 12 aa, synthetic construct
AVWDHTTGWFKI

SEQ ID NO: 46956 - protein, 13 aa, synthetic construct
AVWDKGTTGLFKI

SEQ ID NO: 46957 - protein, 10 aa, synthetic construct
AVWDMGYKKL

SEQ ID NO: 46958 - protein, 11 aa, synthetic construct
AVWDSTGWFKI

SEQ ID NO: 46959 - protein, 12 aa, synthetic construct
AVWDWATGWFKI

SEQ ID NO: 46960 - protein, 12 aa, synthetic construct
AVWGDTTGWFKI

SEQ ID NO: 46961 - protein, 13 aa, synthetic construct
AVWGGYTTGWFKI

SEQ ID NO: 46962 - protein, 12 aa, synthetic construct
AVWGHTTGWFKI

SEQ ID NO: 46963 - protein, 12 aa, synthetic construct
AVWGNTTGWFKI

SEQ ID NO: 46964 - protein, 10 aa, synthetic construct
AVWGNYYKKL

SEQ ID NO: 46965 - protein, 12 aa, synthetic construct
DALEYTTGWLNI

SEQ ID NO: 46966 - protein, 10 aa, synthetic construct
DANTKGLFKI

SEQ ID NO: 46967 - protein, 13 aa, synthetic construct
ASRDSPATGWFKI

SEQ ID NO: 46968 - protein, 11 aa, synthetic construct
DAWDYAGWFKI

SEQ ID NO: 46969 - protein, 13 aa, synthetic construct
DAWDRRSNGLLKI

SEQ ID NO: 46970 - protein, 13 aa, synthetic construct
DAWDSDTTGWVKI

SEQ ID NO: 46971 - protein, 12 aa, synthetic construct
DAWDSGTRWFKI

SEQ ID NO: 46972 - protein, 11 aa, synthetic construct
DAWDSPGWFKI

SEQ ID NO: 46973 - protein, 12 aa, synthetic construct
DAWDSSTGWLKI

SEQ ID NO: 46974 - protein, 11 aa, synthetic construct
DAWDSTGWLKI

SEQ ID NO: 46975 - protein, 11 aa, synthetic construct
DAWDTTGWFEI

SEQ ID NO: 46976 - protein, 11 aa, synthetic construct
DAWDTTGWFKK

SEQ ID NO: 46977 - protein, 12 aa, synthetic construct
DAWDWTNCWFKI

SEQ ID NO: 46978 - protein, 8 aa, synthetic construct
DAWDYEKL

SEQ ID NO: 46979 - protein, 10 aa, synthetic construct
DANTTGWFKI

SEQ ID NO: 46980 - protein, 13 aa, synthetic construct
DAWDYNAAGWFMI

SEQ ID NO: 46981 - protein, 13 aa, synthetic construct
DAWDYNTTGLLKI

SEQ ID NO: 46982 - protein, 12 aa, synthetic construct
DAWDYPTGWFKV

SEQ ID NO: 46983 - protein, 12 aa, synthetic construct
DAWDYTPGWLKI

SEQ ID NO: 46984 - protein, 11 aa, synthetic construct
DAWECDGWFKI

SEQ ID NO: 46985 - protein, 10 aa, synthetic construct
DAWENGWFKI

SEQ ID NO: 46986 - protein, 15 aa, synthetic construct
DAWERNGYTTGWFKI

SEQ ID NO: 46987 - protein, 13 aa, synthetic construct
DAWESESPGWFKI

SEQ ID NO: 46988 - protein, 11 aa, synthetic construct
DAWETTGWFKI

SEQ ID NO: 46989 - protein, 12 aa, synthetic construct
DAWDRGPGWFKI

SEQ ID NO: 46990 - protein, 13 aa, synthetic construct
DAWDPYTTGWFKI

SEQ ID NO: 46991 - protein, 14 aa, synthetic construct
DAWDPSHTTGGFKI

SEQ ID NO: 46992 - protein, 12 aa, synthetic construct
DAWDPKTGWLKI

SEQ ID NO: 46993 - protein, 11 aa, synthetic construct
DAPYTTGWFKI

SEQ ID NO: 46994 - protein, 14 aa, synthetic construct
DARDQGDTTGWFKI

SEQ ID NO: 46995 - protein, 9 aa, synthetic construct
DAVDFYKTR

SEQ ID NO: 46996 - protein, 12 aa, synthetic construct
DAWAHTTGWFKI

SEQ ID NO: 46997 - protein, 10 aa, synthetic construct
DAWASGWLDI

SEQ ID NO: 46998 - protein, 10 aa, synthetic construct
DAWATGLFNI

SEQ ID NO: 46999 - protein, 9 aa, synthetic construct
DAWAYFKKI

SEQ ID NO: 47000 - protein, 11 aa, synthetic construct
DAWDATGWVKI

SEQ ID NO: 47001 - protein, 11 aa, synthetic construct
DAWDCAGWFKG

SEQ ID NO: 47002 - protein, 13 aa, synthetic construct
DAWDCVPPGWFKI

SEQ ID NO: 47003 - protein, 13 aa, synthetic construct
DAWDEETTSWFKI

SEQ ID NO: 47004 - protein, 13 aa, synthetic construct
DAWDFGNNGWLKI

SEQ ID NO: 47005 - protein, 12 aa, synthetic construct
DAWDFNTGWFKI

SEQ ID NO: 47006 - protein, 10 aa, synthetic construct
DAWDGGWFKI

SEQ ID NO: 47007 - protein, 7 aa, synthetic construct
DAWDKKH

SEQ ID NO: 47008 - protein, 12 aa, synthetic construct
DAWDLATGWFRI

SEQ ID NO: 47009 - protein, 11 aa, synthetic construct
DAWDLHGLLKI

SEQ ID NO: 47010 - protein, 12 aa, synthetic construct
DAWDMTTGWFNI

SEQ ID NO: 47011 - protein, 11 aa, synthetic construct
DAWDNTGLFKI

SEQ ID NO: 47012 - protein, 11 aa, synthetic construct
AVGETTGLFKI

SEQ ID NO: 47013 - protein, 11 aa, synthetic construct
AVGETTCWFKI

SEQ ID NO: 47014 - protein, 11 aa, synthetic construct
AVGETPGWFKI

SEQ ID NO: 47015 - protein, 9 aa, synthetic construct
ASWDYGFKI

SEQ ID NO: 47016 - protein, 10 aa, synthetic construct
ASWDSGWFKI

SEQ ID NO: 47017 - protein, 11 aa, synthetic construct
ASWDSLCWFKI

SEQ ID NO: 47018 - protein, 11 aa, synthetic construct
ASWDSNYYNKI

SEQ ID NO: 47019 - protein, 11 aa, synthetic construct
ASWDTTGWFKL

SEQ ID NO: 47020 - protein, 11 aa, synthetic construct
ASWDTTSWFKK

SEQ ID NO: 47021 - protein, 13 aa, synthetic construct
ASWDTYTTGWFKI

SEQ ID NO: 47022 - protein, 12 aa, synthetic construct
ASWDWGTGWFKI

SEQ ID NO: 47023 - protein, 13 aa, synthetic construct
ASWDYEFTGWFKI

SEQ ID NO: 47024 - protein, 13 aa, synthetic construct
ASWDYFNTGCLKI

SEQ ID NO: 47025 - protein, 13 aa, synthetic construct
ASWDYHTNGWLKI

SEQ ID NO: 47026 - protein, 11 aa, synthetic construct
AVGEATGWFKM

SEQ ID NO: 47027 - protein, 13 aa, synthetic construct
ASWDYKTTGWFKI

SEQ ID NO: 47028 - protein, 14 aa, synthetic construct
ASWDYPFTTGWFKI

SEQ ID NO: 47029 - protein, 11 aa, synthetic construct
ASWDYPGLLKI

SEQ ID NO: 47030 - protein, 14 aa, synthetic construct
ASWDYPGTTGWFKI

SEQ ID NO: 47031 - protein, 12 aa, synthetic construct
ASWDYRTGWFKI

SEQ ID NO: 47032 - protein, 12 aa, synthetic construct
ASWDYTTGWFKI

SEQ ID NO: 47033 - protein, 8 aa, synthetic construct
ASWDYVKL

SEQ ID NO: 47034 - protein, 14 aa, synthetic construct
ASWDYVWNTVWFNK

SEQ ID NO: 47035 - protein, 12 aa, synthetic construct
ASWEDNNCWFKI

SEQ ID NO: 47036 - protein, 12 aa, synthetic construct
ASWDSGTGWFKI

SEQ ID NO: 47037 - protein, 11 aa, synthetic construct
ASWDSGGWFKI

SEQ ID NO: 47038 - protein, 12 aa, synthetic construct
ASWDRGTGGFKI

SEQ ID NO: 47039 - protein, 11 aa, synthetic construct
ASWDNTGLFKI

SEQ ID NO: 47040 - protein, 12 aa, synthetic construct
ASWANTTGWFKI

SEQ ID NO: 47041 - protein, 12 aa, synthetic construct
ASWAYNTGWFKI

SEQ ID NO: 47042 - protein, 12 aa, synthetic construct
ASWAYTNGWLKI

SEQ ID NO: 47043 - protein, 12 aa, synthetic construct
SAWEDNTGWFKI

SEQ ID NO: 47044 - protein, 11 aa, synthetic construct
ASWDATGWFKI

SEQ ID NO: 47045 - protein, 11 aa, synthetic construct
ASWDCTGWFKI

SEQ ID NO: 47046 - protein, 12 aa, synthetic construct
ASWDDNTGWFKI

SEQ ID NO: 47047 - protein, 12 aa, synthetic construct
ASWDDTTGWLKI

SEQ ID NO: 47048 - protein, 13 aa, synthetic construct
ASWDEETTGWFKI

SEQ ID NO: 47049 - protein, 12 aa, synthetic construct
ASWDFATGWFKI

SEQ ID NO: 47050 - protein, 10 aa, synthetic construct
ASWDFGLLKI

SEQ ID NO: 47051 - protein, 10 aa, synthetic construct
ASWDFGWLKI

SEQ ID NO: 47052 - protein, 10 aa, synthetic construct
ASWDFGYKKK

SEQ ID NO: 47053 - protein, 13 aa, synthetic construct
ASWDFNTNGWLKI

SEQ ID NO: 47054 - protein, 11 aa, synthetic construct
ASWDFRYYKKL

SEQ ID NO: 47055 - protein, 12 aa, synthetic construct
ASWDGATGWFKI

SEQ ID NO: 47056 - protein, 12 aa, synthetic construct
ASWDKNTGWLNI

SEQ ID NO: 47057 - protein, 12 aa, synthetic construct
ASWDLPTGWFKI

SEQ ID NO: 47058 - protein, 12 aa, synthetic construct
ASWDLSTGWFKI

SEQ ID NO: 47059 - protein, 9 aa, synthetic construct
ASWEEYKKL

SEQ ID NO: 47060 - protein, 9 aa, synthetic construct
ASWEGWFKI

SEQ ID NO: 47061 - protein, 10 aa, synthetic construct
ASWEKYYNKI

SEQ ID NO: 47062 - protein, 12 aa, synthetic construct
ASWVYTTGWFKI

SEQ ID NO: 47063 - protein, 12 aa, synthetic construct
ATGDYTTGWFKI

SEQ ID NO: 47064 - protein, 10 aa, synthetic construct
ATNTTGWFKI

SEQ ID NO: 47065 - protein, 12 aa, synthetic construct
ATRDLGTGWLKI

SEQ ID NO: 47066 - protein, 8 aa, synthetic construct
ATWADRKL

SEQ ID NO: 47067 - protein, 11 aa, synthetic construct
ATWDCSGWFKI

SEQ ID NO: 47068 - protein, 12 aa, synthetic construct
ATWDCTTGWFKI

SEQ ID NO: 47069 - protein, 12 aa, synthetic construct
ATWDDTTGWFKI

SEQ ID NO: 47070 - protein, 13 aa, synthetic construct
ATWDFGTTGWFKI

SEQ ID NO: 47071 - protein, 10 aa, synthetic construct
ATWDFGWFKI

SEQ ID NO: 47072 - protein, 12 aa, synthetic construct
ATWDPTTGWFKI

SEQ ID NO: 47073 - protein, 12 aa, synthetic construct
ATWDSATGWFRI

SEQ ID NO: 47074 - protein, 14 aa, synthetic construct
ATWDSGGTTGWFKI

SEQ ID NO: 47075 - protein, 14 aa, synthetic construct
ATWDSGYTTGWFKI

SEQ ID NO: 47076 - protein, 12 aa, synthetic construct
ATWDWGTGWFKI

SEQ ID NO: 47077 - protein, 12 aa, synthetic construct
ATWDYSTGWFKI

SEQ ID NO: 47078 - protein, 15 aa, synthetic construct
ATWERKGYTTGWFKI

SEQ ID NO: 47079 - protein, 13 aa, synthetic construct
ATWGGYTTGWFKI

SEQ ID NO: 47080 - protein, 12 aa, synthetic construct
ATWGLATGWFKI

SEQ ID NO: 47081 - protein, 11 aa, synthetic construct
ATWYTTGWFKI

SEQ ID NO: 47082 - protein, 11 aa, synthetic construct
ATCDNNGLFKI

SEQ ID NO: 47083 - protein, 10 aa, synthetic construct
ASWVTGWFKK

SEQ ID NO: 47084 - protein, 13 aa, synthetic construct
ASWELYKTGWFKI

SEQ ID NO: 47085 - protein, 10 aa, synthetic construct
ASWVTGWFKI

SEQ ID NO: 47086 - protein, 11 aa, synthetic construct
ASWENTRWFKI

SEQ ID NO: 47087 - protein, 12 aa, synthetic construct
ASWENTTGWFKI

SEQ ID NO: 47088 - protein, 10 aa, synthetic construct
ASWENYYNKL

SEQ ID NO: 47089 - protein, 11 aa, synthetic construct
ASWETPGWFKI

SEQ ID NO: 47090 - protein, 11 aa, synthetic construct
ASWETTGWFKI

SEQ ID NO: 47091 - protein, 12 aa, synthetic construct
ASWEYNNGWLKI

SEQ ID NO: 47092 - protein, 12 aa, synthetic construct
ASWEYTTGWFKI

SEQ ID NO: 47093 - protein, 12 aa, synthetic construct
ASWGDTTGWFKI

SEQ ID NO: 47094 - protein, 13 aa, synthetic construct
ASWGGDTTGWFKI

SEQ ID NO: 47095 - protein, 11 aa, synthetic construct
ASWGHPGWFKI

SEQ ID NO: 47096 - protein, 12 aa, synthetic construct
SAWDYTTGWFKI

SEQ ID NO: 47097 - protein, 10 aa, synthetic construct
ASWGPGLFNI

SEQ ID NO: 47098 - protein, 12 aa, synthetic construct
ASWGSGTCWFKI

SEQ ID NO: 47099 - protein, 10 aa, synthetic construct
ASWGTGLFKI

SEQ ID NO: 47100 - protein, 12 aa, synthetic construct
ASWGVPTGWFKI

SEQ ID NO: 47101 - protein, 12 aa, synthetic construct
ASWGYTNGWFKI

SEQ ID NO: 47102 - protein, 12 aa, synthetic construct
SAWDYRVGWFKI

SEQ ID NO: 47103 - protein, 12 aa, synthetic construct
ASWGYTTGWFKI

SEQ ID NO: 47104 - protein, 12 aa, synthetic construct
ASWGYTTVWFKK

SEQ ID NO: 47105 - protein, 12 aa, synthetic construct
DAWEYNTGWFKI

SEQ ID NO: 47106 - protein, 12 aa, synthetic construct
DAWEYTTGWFKI

SEQ ID NO: 47107 - protein, 12 aa, synthetic construct
DAWGDTTGWFKI

SEQ ID NO: 47108 - protein, 12 aa, synthetic construct
LRGTHIPLVGSR

SEQ ID NO: 47109 - protein, 11 aa, synthetic construct
LRGPLPLVGSR

SEQ ID NO: 47110 - protein, 12 aa, synthetic construct
LRGPRIPLVGSR

SEQ ID NO: 47111 - protein, 9 aa, synthetic construct
LRGRIIRNS

SEQ ID NO: 47112 - protein, 12 aa, synthetic construct
LRGSIIPLVGSI

SEQ ID NO: 47113 - protein, 11 aa, synthetic construct
LRGSIPLVGSR

SEQ ID NO: 47114 - protein, 9 aa, synthetic construct
LRGSLVGSR

SEQ ID NO: 47115 - protein, 9 aa, synthetic construct
LRGSRIRNS

SEQ ID NO: 47116 - protein, 11 aa, synthetic construct
LRGSWPLVGSR

SEQ ID NO: 47117 - protein, 12 aa, synthetic construct
LRGTDIPLVGSR

SEQ ID NO: 47118 - protein, 12 aa, synthetic construct
SAWDYITGLFKI

SEQ ID NO: 47119 - protein, 10 aa, synthetic construct
LRGIPIIRNS

SEQ ID NO: 47120 - protein, 12 aa, synthetic construct
LRGTSIPLVGSR

SEQ ID NO: 47121 - protein, 10 aa, synthetic construct
LRGVPLVCSR

SEQ ID NO: 47122 - protein, 9 aa, synthetic construct
LRRALVGSR

SEQ ID NO: 47123 - protein, 7 aa, synthetic construct
LRVGRNS

SEQ ID NO: 47124 - protein, 7 aa, synthetic construct
LWDIRNS

SEQ ID NO: 47125 - protein, 12 aa, synthetic construct
NAWDLDTGCLKI

SEQ ID NO: 47126 - protein, 6 aa, synthetic construct
PRGGAR

SEQ ID NO: 47127 - protein, 6 aa, synthetic construct
PRGGSR

SEQ ID NO: 47128 - protein, 12 aa, synthetic construct
PRGSIVPLVGSR

SEQ ID NO: 47129 - protein, 11 aa, synthetic construct
LRGNIPLVGSI

SEQ ID NO: 47130 - protein, 12 aa, synthetic construct
LRGMRRPRVGSR

SEQ ID NO: 47131 - protein, 12 aa, synthetic construct
LRGMRRPLVGSR

SEQ ID NO: 47132 - protein, 11 aa, synthetic construct
LRGMIPLVGSR

SEQ ID NO: 47133 - protein, 10 aa, synthetic construct
LRGIPLVGSI

SEQ ID NO: 47134 - protein, 13 aa, synthetic construct
LRGIPRDPLVGSR

SEQ ID NO: 47135 - protein, 8 aa, synthetic construct
LRGIPRNS

SEQ ID NO: 47136 - protein, 12 aa, synthetic construct
LRGIREPLVGSR

SEQ ID NO: 47137 - protein, 13 aa, synthetic construct
LRGIRGGTLVGSR

SEQ ID NO: 47138 - protein, 8 aa, synthetic construct
LRGIRIRN

SEQ ID NO: 47139 - protein, 12 aa, synthetic construct
LRGIRKPLGGSR

SEQ ID NO: 47140 - protein, 10 aa, synthetic construct
LRGIRLVGSR

SEQ ID NO: 47141 - protein, 13 aa, synthetic construct
LRGIRRIPLVGSR

SEQ ID NO: 47142 - protein, 13 aa, synthetic construct
LRGITLSPLVGSR

SEQ ID NO: 47143 - protein, 11 aa, synthetic construct
LRGITPLVCSR

SEQ ID NO: 47144 - protein, 11 aa, synthetic construct
LRGITPLVGSR

SEQ ID NO: 47145 - protein, 13 aa, synthetic construct
LRGITVHTRVGSR

SEQ ID NO: 47146 - protein, 8 aa, synthetic construct
LRGIVGSR

SEQ ID NO: 47147 - protein, 11 aa, synthetic construct
LRGIVPLVGSR

SEQ ID NO: 47148 - protein, 11 aa, synthetic construct
LRGIWALVGSR

SEQ ID NO: 47149 - protein, 7 aa, synthetic construct
LRGIWGR

SEQ ID NO: 47150 - protein, 13 aa, synthetic construct
LRGIWRIPLVGSR

SEQ ID NO: 47151 - protein, 9 aa, synthetic construct
LRGLIIRNS

SEQ ID NO: 47152 - protein, 11 aa, synthetic construct
QRGIKPLGGSR

SEQ ID NO: 47153 - protein, 9 aa, synthetic construct
QYNTGWFKI

SEQ ID NO: 47154 - protein, 9 aa, synthetic construct
QYSTGWFKI

SEQ ID NO: 47155 - protein, 10 aa, synthetic construct
SAWDGGWFKI

SEQ ID NO: 47156 - protein, 12 aa, synthetic construct
SAWDLGTGWFKI

SEQ ID NO: 47157 - protein, 12 aa, synthetic construct
SAWDLWPGWFKI

SEQ ID NO: 47158 - protein, 11 aa, synthetic construct
SAWDNTGWFNI

SEQ ID NO: 47159 - protein, 14 aa, synthetic construct
SAWDPGDTTGWFKI

SEQ ID NO: 47160 - protein, 13 aa, synthetic construct
SAWDPTGTGWFKI

SEQ ID NO: 47161 - protein, 11 aa, synthetic construct
SAWDPTGWLKI

SEQ ID NO: 47162 - protein, 12 aa, synthetic construct
SAWDPTTGWFKI

SEQ ID NO: 47163 - protein, 13 aa, synthetic construct
SAWDPYTTGWFKI

SEQ ID NO: 47164 - protein, 12 aa, synthetic construct
SAWDQTTGWFNI

SEQ ID NO: 47165 - protein, 12 aa, synthetic construct
SAWDRGSGWFKI

SEQ ID NO: 47166 - protein, 12 aa, synthetic construct
SAWDRTTCLLKI

SEQ ID NO: 47167 - protein, 12 aa, synthetic construct
SAWDRTTGWFQI

SEQ ID NO: 47168 - protein, 12 aa, synthetic construct
SAWDSGTGWLKI

SEQ ID NO: 47169 - protein, 11 aa, synthetic construct
SAWDSLGWFKI

SEQ ID NO: 47170 - protein, 13 aa, synthetic construct
SAWDSNTTGWFKI

SEQ ID NO: 47171 - protein, 13 aa, synthetic construct
SAWDSPATGWLKI

SEQ ID NO: 47172 - protein, 9 aa, synthetic construct
SAWDSWFKI

SEQ ID NO: 47173 - protein, 10 aa, synthetic construct
SAWDTGWFKI

SEQ ID NO: 47174 - protein, 11 aa, synthetic construct
SAWDTTGLFNI

SEQ ID NO: 47175 - protein, 8 aa, synthetic construct
SAWDLGKI

SEQ ID NO: 47176 - protein, 12 aa, synthetic construct
SAWDFTTGWLKI

SEQ ID NO: 47177 - protein, 9 aa, synthetic construct
QYTPGWFKI

SEQ ID NO: 47178 - protein, 12 aa, synthetic construct
SAWDFRGGWFKI

SEQ ID NO: 47179 - protein, 9 aa, synthetic construct
QYTTGWFEV

SEQ ID NO: 47180 - protein, 10 aa, synthetic construct
RRDIRLVGSR

SEQ ID NO: 47181 - protein, 13 aa, synthetic construct
SACDEETTGCFKI

SEQ ID NO: 47182 - protein, 12 aa, synthetic construct
SACDLGTGWFKI

SEQ ID NO: 47183 - protein, 12 aa, synthetic construct
SACDWTTGWFKI

SEQ ID NO: 47184 - protein, 7 aa, synthetic construct
SACPFKI

SEQ ID NO: 47185 - protein, 9 aa, synthetic construct
SACTGWLNI

SEQ ID NO: 47186 - protein, 10 aa, synthetic construct
SADTTGLFKI

SEQ ID NO: 47187 - protein, 12 aa, synthetic construct
SALAHTTGWFKI

SEQ ID NO: 47188 - protein, 11 aa, synthetic construct
SAWADTCWFKI

SEQ ID NO: 47189 - protein, 12 aa, synthetic construct
SAWANTTGWFKI

SEQ ID NO: 47190 - protein, 11 aa, synthetic construct
SAWATTGWFKI

SEQ ID NO: 47191 - protein, 12 aa, synthetic construct
SAWAYNTGWLKI

SEQ ID NO: 47192 - protein, 13 aa, synthetic construct
SAWDCVPTGWFKI

SEQ ID NO: 47193 - protein, 13 aa, synthetic construct
SAWDDDNTGLLKI

SEQ ID NO: 47194 - protein, 12 aa, synthetic construct
SAWDDTTGWFKI

SEQ ID NO: 47195 - protein, 10 aa, synthetic construct
SAWDFGWFKI

SEQ ID NO: 47196 - protein, 11 aa, synthetic construct
SAWDFPGWFKI

SEQ ID NO: 47197 - protein, 11 aa, synthetic construct
SAWDFPGWLKI

SEQ ID NO: 47198 - protein, 12 aa, synthetic construct
LRGIPIPLVGSR

SEQ ID NO: 47199 - protein, 12 aa, synthetic construct
LRGINGPLVGSR

SEQ ID NO: 47200 - protein, 12 aa, synthetic construct
DAWGGATGWFKI

SEQ ID NO: 47201 - protein, 13 aa, synthetic construct
EACEGDTNGWFKI

SEQ ID NO: 47202 - protein, 10 aa, synthetic construct
DEWGTGWFKI

SEQ ID NO: 47203 - protein, 9 aa, synthetic construct
DEWVRLFKI

SEQ ID NO: 47204 - protein, 12 aa, synthetic construct
DSLDKTNGWLKI

SEQ ID NO: 47205 - protein, 12 aa, synthetic construct
DSWDCNTGCLNI

SEQ ID NO: 47206 - protein, 11 aa, synthetic construct
DSWDNTGWFKI

SEQ ID NO: 47207 - protein, 11 aa, synthetic construct
DSWDTTGWFKI

SEQ ID NO: 47208 - protein, 12 aa, synthetic construct
DSWDYNTGWFKI

SEQ ID NO: 47209 - protein, 12 aa, synthetic construct
DTWGDTTGWFKI

SEQ ID NO: 47210 - protein, 12 aa, synthetic construct
SAWDYITGWLKI

SEQ ID NO: 47211 - protein, 10 aa, synthetic construct
EACGNGWFKI

SEQ ID NO: 47212 - protein, 12 aa, synthetic construct
LRGIMRSLVGSR

SEQ ID NO: 47213 - protein, 8 aa, synthetic construct
EAGDLFKI

SEQ ID NO: 47214 - protein, 11 aa, synthetic construct
EAPNTKCWFKI

SEQ ID NO: 47215 - protein, 9 aa, synthetic construct
EAWDEYKKL

SEQ ID NO: 47216 - protein, 9 aa, synthetic construct
EAWDGWFKI

SEQ ID NO: 47217 - protein, 9 aa, synthetic construct
EAWENNKKL

SEQ ID NO: 47218 - protein, 10 aa, synthetic construct
EAWENYYKKL

SEQ ID NO: 47219 - protein, 12 aa, synthetic construct
EAWGHTTGLLNK

SEQ ID NO: 47220 - protein, 6 aa, synthetic construct
ESGFKI

SEQ ID NO: 47221 - protein, 12 aa, synthetic construct
ESWANTTGWFKI

SEQ ID NO: 47222 - protein, 9 aa, synthetic construct
DEWGRKKKL

SEQ ID NO: 47223 - protein, 15 aa, synthetic construct
DEWGHDGYTTGLLKI

SEQ ID NO: 47224 - protein, 10 aa, synthetic construct
DEWENYYKRL

SEQ ID NO: 47225 - protein, 10 aa, synthetic construct
DEWDYDYKKH

SEQ ID NO: 47226 - protein, 12 aa, synthetic construct
DAWGLTTGCVKV

SEQ ID NO: 47227 - protein, 10 aa, synthetic construct
DAWGTGWFKI

SEQ ID NO: 47228 - protein, 10 aa, synthetic construct
DAWGTGWFNI

SEQ ID NO: 47229 - protein, 11 aa, synthetic construct
DAWGTTGWLKI

SEQ ID NO: 47230 - protein, 10 aa, synthetic construct
DAWGTVWFNI

SEQ ID NO: 47231 - protein, 12 aa, synthetic construct
DAWGYNTGWLKL

SEQ ID NO: 47232 - protein, 12 aa, synthetic construct
DAWGYTNGWFKI

SEQ ID NO: 47233 - protein, 11 aa, synthetic construct
DAWHTNGWLKI

SEQ ID NO: 47234 - protein, 10 aa, synthetic construct
DAWPTGWLKI

SEQ ID NO: 47235 - protein, 12 aa, synthetic construct
DAWVHTTGWFKI

SEQ ID NO: 47236 - protein, 12 aa, synthetic construct
DAWVTTTGWFKI

SEQ ID NO: 47237 - protein, 13 aa, synthetic construct
DAWYRRNNVFFKI

SEQ ID NO: 47238 - protein, 11 aa, synthetic construct
DEEYNTGLLKI

SEQ ID NO: 47239 - protein, 12 aa, synthetic construct
DEWAYTTVWFNI

SEQ ID NO: 47240 - protein, 13 aa, synthetic construct
DEWDFHNTGWFKI

SEQ ID NO: 47241 - protein, 12 aa, synthetic construct
DEWDFNTGWLKI

SEQ ID NO: 47242 - protein, 13 aa, synthetic construct
DEWDSDTNGWFKI

SEQ ID NO: 47243 - protein, 11 aa, synthetic construct
DEWDSTGWFNI

SEQ ID NO: 47244 - protein, 12 aa, synthetic construct
DEWDWTTGWFKI

SEQ ID NO: 47245 - protein, 12 aa, synthetic construct
ESWDCGTGWLKI

SEQ ID NO: 47246 - protein, 13 aa, synthetic construct
GACDPNTTGGFKI

SEQ ID NO: 47247 - protein, 11 aa, synthetic construct
GACNNTGWLKI

SEQ ID NO: 47248 - protein, 12 aa, synthetic construct
LRETSGPLVGSR

SEQ ID NO: 47249 - protein, 10 aa, synthetic construct
LRGAPQVGSR

SEQ ID NO: 47250 - protein, 10 aa, synthetic construct
LRGFIIIRNS

SEQ ID NO: 47251 - protein, 12 aa, synthetic construct
LRGGEIPLVGSR

SEQ ID NO: 47252 - protein, 12 aa, synthetic construct
LRGGGIPLVGSR

SEQ ID NO: 47253 - protein, 10 aa, synthetic construct
LRGGIIIRNS

SEQ ID NO: 47254 - protein, 4 aa, synthetic construct
LRGI

SEQ ID NO: 47255 - protein, 10 aa, synthetic construct
LRGIAVVGSR

SEQ ID NO: 47256 - protein, 11 aa, synthetic construct
LRGIEPLVGSR

SEQ ID NO: 47257 - protein, 11 aa, synthetic construct
LRGIGDLVGSR

SEQ ID NO: 47258 - protein, 10 aa, synthetic construct
LRGIGIIRNS

SEQ ID NO: 47259 - protein, 12 aa, synthetic construct
LRGIGIPLVGSR

SEQ ID NO: 47260 - protein, 7 aa, synthetic construct
LRGIGSR

SEQ ID NO: 47261 - protein, 13 aa, synthetic construct
LRGIKGIQLVGSR

SEQ ID NO: 47262 - protein, 13 aa, synthetic construct
LRGIKGVPLVGSR

SEQ ID NO: 47263 - protein, 11 aa, synthetic construct
LRGILPLVGSR

SEQ ID NO: 47264 - protein, 9 aa, synthetic construct
LRGILVGSR

SEQ ID NO: 47265 - protein, 12 aa, synthetic construct
LRGIMGPLVGSR

SEQ ID NO: 47266 - protein, 12 aa, synthetic construct
LRGIMMPLVGSR

SEQ ID NO: 47267 - protein, 11 aa, synthetic construct
LRGIMPLVGSR

SEQ ID NO: 47268 - protein, 9 aa, synthetic construct
LRGALVGSR

SEQ ID NO: 47269 - protein, 11 aa, synthetic construct
LRDSIPLVGSR

SEQ ID NO: 47270 - protein, 12 aa, synthetic construct
GAGAETTGCFKI

SEQ ID NO: 47271 - protein, 11 aa, synthetic construct
LHGIGALVGSR

SEQ ID NO: 47272 - protein, 12 aa, synthetic construct
GAGALSTGWFKI

SEQ ID NO: 47273 - protein, 11 aa, synthetic construct
GAGDTTGWFEI

SEQ ID NO: 47274 - protein, 11 aa, synthetic construct
GAGDTTGWLKI

SEQ ID NO: 47275 - protein, 13 aa, synthetic construct
GAGVYRSTGWFKI

SEQ ID NO: 47276 - protein, 11 aa, synthetic construct
GAWAYPVCFKI

SEQ ID NO: 47277 - protein, 12 aa, synthetic construct
GAWDCPTGWVEI

SEQ ID NO: 47278 - protein, 13 aa, synthetic construct
GAWDLDTTGWFKI

SEQ ID NO: 47279 - protein, 11 aa, synthetic construct
GAWDNTGWFKI

SEQ ID NO: 47280 - protein, 14 aa, synthetic construct
GAWDPRYNTGLFKI

SEQ ID NO: 47281 - protein, 11 aa, synthetic construct
GAWDTTGWFKI

SEQ ID NO: 47282 - protein, 11 aa, synthetic construct
GAWDTTGWFKL

SEQ ID NO: 47283 - protein, 13 aa, synthetic construct
GAWDWNTTGWFKI

SEQ ID NO: 47284 - protein, 12 aa, synthetic construct
GAWDWTTGWFKI

SEQ ID NO: 47285 - protein, 12 aa, synthetic construct
GAWGDTTGWLKI

SEQ ID NO: 47286 - protein, 9 aa, synthetic construct
GAWGPYKKL

SEQ ID NO: 47287 - protein, 9 aa, synthetic construct
GAWGYYKKL

SEQ ID NO: 47288 - protein, 14 aa, synthetic construct
GSWDLPHTTGGFKI

SEQ ID NO: 47289 - protein, 12 aa, synthetic construct
GSWDRNTGWFEI

SEQ ID NO: 47290 - protein, 5 aa, synthetic construct
GWFMI

SEQ ID NO: 47291 - protein, 9 aa, synthetic construct
ASTTGWFKI

SEQ ID NO: 47292 - protein, 8 aa, synthetic construct
ASPGLLKI

SEQ ID NO: 47293 - protein, 12 aa, synthetic construct
AAWGVTNGWFKI

SEQ ID NO: 47294 - protein, 10 aa, synthetic construct
AAWSTGWFKV

SEQ ID NO: 47295 - protein, 11 aa, synthetic construct
AAWSATGWFMI

SEQ ID NO: 47296 - protein, 12 aa, synthetic construct
AAWSDTTGWFKI

SEQ ID NO: 47297 - protein, 12 aa, synthetic construct
AAWSHTTGWFKV

SEQ ID NO: 47298 - protein, 10 aa, synthetic construct
AAWSKGWFKI

SEQ ID NO: 47299 - protein, 12 aa, synthetic construct
AAWSLATGWFKI

SEQ ID NO: 47300 - protein, 12 aa, synthetic construct
AAWSNTTGWFKI

SEQ ID NO: 47301 - protein, 14 aa, synthetic construct
AAWSSTRPTGWFKI

SEQ ID NO: 47302 - protein, 12 aa, synthetic construct
SAWDWGTGWFKI

SEQ ID NO: 47303 - protein, 12 aa, synthetic construct
SAWVYTTGWFKI

SEQ ID NO: 47304 - protein, 10 aa, synthetic construct
AAWSTGWFRI

SEQ ID NO: 47305 - protein, 9 aa, synthetic construct
AAWTGWFKL

SEQ ID NO: 47306 - protein, 10 aa, synthetic construct
AAWSTGWFTI

SEQ ID NO: 47307 - protein, 10 aa, synthetic construct
AAWSTGWLKI

SEQ ID NO: 47308 - protein, 10 aa, synthetic construct
AAWSTGWVKI

SEQ ID NO: 47309 - protein, 12 aa, synthetic construct
AAWSYNTGWFKI

SEQ ID NO: 47310 - protein, 12 aa, synthetic construct
AAWSYTPGWFKI

SEQ ID NO: 47311 - protein, 12 aa, synthetic construct
AAWSYTTGLFKI

SEQ ID NO: 47312 - protein, 11 aa, synthetic construct
SAWVSPGWFKI

SEQ ID NO: 47313 - protein, 12 aa, synthetic construct
AAWSYTTGWFKM

SEQ ID NO: 47314 - protein, 12 aa, synthetic construct
AAWSYTTGWSKI

SEQ ID NO: 47315 - protein, 10 aa, synthetic construct
AAWRLGWFKI

SEQ ID NO: 47316 - protein, 13 aa, synthetic construct
AAWRGTTTGWFKI

SEQ ID NO: 47317 - protein, 13 aa, synthetic construct
AAWRGTTPGGVKI

SEQ ID NO: 47318 - protein, 13 aa, synthetic construct
AAWRGNTTGWVKI

SEQ ID NO: 47319 - protein, 10 aa, synthetic construct
AAWPTDWFKI

SEQ ID NO: 47320 - protein, 10 aa, synthetic construct
AAWPTGGFKI

SEQ ID NO: 47321 - protein, 10 aa, synthetic construct
AAWPTGLFKI

SEQ ID NO: 47322 - protein, 10 aa, synthetic construct
AAWPTGRFNK

SEQ ID NO: 47323 - protein, 10 aa, synthetic construct
SESGTGWLKI

SEQ ID NO: 47324 - protein, 10 aa, synthetic construct
AAWPTGWFNI

SEQ ID NO: 47325 - protein, 10 aa, synthetic construct
AAWPTGWLKL

SEQ ID NO: 47326 - protein, 10 aa, synthetic construct
AAWPTGWSKI

SEQ ID NO: 47327 - protein, 11 aa, synthetic construct
AAWPTTGWFKI

SEQ ID NO: 47328 - protein, 11 aa, synthetic construct
AAWPTTGWVTI

SEQ ID NO: 47329 - protein, 9 aa, synthetic construct
AAWPYYKRL

SEQ ID NO: 47330 - protein, 10 aa, synthetic construct
AAWRAGWFRI

SEQ ID NO: 47331 - protein, 11 aa, synthetic construct
SELDNTGWFKI

SEQ ID NO: 47332 - protein, 10 aa, synthetic construct
AAWRFGWLKI

SEQ ID NO: 47333 - protein, 13 aa, synthetic construct
AAWRGDTTGWFKI

SEQ ID NO: 47334 - protein, 13 aa, synthetic construct
AAWRGNTPGWFKI

SEQ ID NO: 47335 - protein, 13 aa, synthetic construct
AAWRGNTTGGFKI

SEQ ID NO: 47336 - protein, 8 aa, synthetic construct
SDKGWFKI

SEQ ID NO: 47337 - protein, 13 aa, synthetic construct
AAWRGNTTGLLKI

SEQ ID NO: 47338 - protein, 12 aa, synthetic construct
SAWVSGTGWFKI

SEQ ID NO: 47339 - protein, 9 aa, synthetic construct
AAWTGWFQI

SEQ ID NO: 47340 - protein, 12 aa, synthetic construct
ASLVYTTGWFKI

SEQ ID NO: 47341 - protein, 15 aa, synthetic construct
AAWVPEGYNTGWLKI

SEQ ID NO: 47342 - protein, 12 aa, synthetic construct
AAWVLTTGWFKI

SEQ ID NO: 47343 - protein, 10 aa, synthetic construct
AAWVNGLFKI

SEQ ID NO: 47344 - protein, 12 aa, synthetic construct
AAWVNKTGWFKI

SEQ ID NO: 47345 - protein, 8 aa, synthetic construct
SAWGWFKI

SEQ ID NO: 47346 - protein, 12 aa, synthetic construct
AAWVNTTGWLKI

SEQ ID NO: 47347 - protein, 10 aa, synthetic construct
AAWVNVWFKI

SEQ ID NO: 47348 - protein, 15 aa, synthetic construct
AAWVPEGCTTGWFKI

SEQ ID NO: 47349 - protein, 15 aa, synthetic construct
AAWVPEGHTTGWFKI

SEQ ID NO: 47350 - protein, 15 aa, synthetic construct
AAWVPEGYNTGLFKI

SEQ ID NO: 47351 - protein, 12 aa, synthetic construct
AAWVPEGYTTGW

SEQ ID NO: 47352 - protein, 9 aa, synthetic construct
AAWTGWSKI

SEQ ID NO: 47353 - protein, 11 aa, synthetic construct
SAWGTTGWFKM

SEQ ID NO: 47354 - protein, 8 aa, synthetic construct
AAWVPIKI

SEQ ID NO: 47355 - protein, 9 aa, synthetic construct
AAWVPRFKI

SEQ ID NO: 47356 - protein, 15 aa, synthetic construct
AAWVPSLYTTGWFKI

SEQ ID NO: 47357 - protein, 8 aa, synthetic construct
AAWVPVKI

SEQ ID NO: 47358 - protein, 12 aa, synthetic construct
AAWVQTTGWLKI

SEQ ID NO: 47359 - protein, 13 aa, synthetic construct
AAWVQYTTGWFKI

SEQ ID NO: 47360 - protein, 12 aa, synthetic construct
AAWVRGTGWLKI

SEQ ID NO: 47361 - protein, 9 aa, synthetic construct
AAWVRLFKI

SEQ ID NO: 47362 - protein, 12 aa, synthetic construct
AAWVLPTGWFKI

SEQ ID NO: 47363 - protein, 13 aa, synthetic construct
AAWVKYTTGWFKI

SEQ ID NO: 47364 - protein, 12 aa, synthetic construct
AAWVKTTGWFEI

SEQ ID NO: 47365 - protein, 10 aa, synthetic construct
AAWVHYYNKL

SEQ ID NO: 47366 - protein, 13 aa, synthetic construct
AAWTLYTTGWFKI

SEQ ID NO: 47367 - protein, 6 aa, synthetic construct
AAWTTG

SEQ ID NO: 47368 - protein, 12 aa, synthetic construct
SAWVHTTGWFKI

SEQ ID NO: 47369 - protein, 10 aa, synthetic construct
AAWTTGWFKL

SEQ ID NO: 47370 - protein, 11 aa, synthetic construct
AAWTTPGWFQI

SEQ ID NO: 47371 - protein, 9 aa, synthetic construct
SAWTGLFKI

SEQ ID NO: 47372 - protein, 11 aa, synthetic construct
AAWVATGWFKI

SEQ ID NO: 47373 - protein, 11 aa, synthetic construct
AAWVFHCRFKI

SEQ ID NO: 47374 - protein, 12 aa, synthetic construct
AAWVFTTGWFKI

SEQ ID NO: 47375 - protein, 14 aa, synthetic construct
AAWVGGYTTGWFKI

SEQ ID NO: 47376 - protein, 9 aa, synthetic construct
AAWVGLFKI

SEQ ID NO: 47377 - protein, 12 aa, synthetic construct
AAWVGTTGWFKI

SEQ ID NO: 47378 - protein, 9 aa, synthetic construct
AAWVGWFKL

SEQ ID NO: 47379 - protein, 9 aa, synthetic construct
AAWVGWSKI

SEQ ID NO: 47380 - protein, 12 aa, synthetic construct
AAWVHNTGWFNI

SEQ ID NO: 47381 - protein, 12 aa, synthetic construct
AAWVHTPGWFKI

SEQ ID NO: 47382 - protein, 12 aa, synthetic construct
AAWVHTTGGFKI

SEQ ID NO: 47383 - protein, 12 aa, synthetic construct
AAWVHTTGWFKL

SEQ ID NO: 47384 - protein, 12 aa, synthetic construct
AAWVHTTGWLKI

SEQ ID NO: 47385 - protein, 10 aa, synthetic construct
AAWPTCWFKI

SEQ ID NO: 47386 - protein, 8 aa, synthetic construct
SEWADKKL

SEQ ID NO: 47387 - protein, 9 aa, synthetic construct
AAWPDYKKL

SEQ ID NO: 47388 - protein, 12 aa, synthetic construct
AAWGYTACWFKI

SEQ ID NO: 47389 - protein, 12 aa, synthetic construct
AAWGYGTGWFKI

SEQ ID NO: 47390 - protein, 7 aa, synthetic construct
AAWGYKI

SEQ ID NO: 47391 - protein, 8 aa, synthetic construct
AAWGYKKH

SEQ ID NO: 47392 - protein, 8 aa, synthetic construct
AAWGYNTG

SEQ ID NO: 47393 - protein, 12 aa, synthetic construct
AAWGYNTGWFKK

SEQ ID NO: 47394 - protein, 12 aa, synthetic construct
AAWGYNTGWFKL

SEQ ID NO: 47395 - protein, 12 aa, synthetic construct
AAWGYNTGWFNK

SEQ ID NO: 47396 - protein, 12 aa, synthetic construct
AAWGYPTGWFQI

SEQ ID NO: 47397 - protein, 13 aa, synthetic construct
AAWGYSTTGWFKI

SEQ ID NO: 47398 - protein, 12 aa, synthetic construct
AAWGYTNCWVKI

SEQ ID NO: 47399 - protein, 12 aa, synthetic construct
AAWNYTTGWFKI

SEQ ID NO: 47400 - skipped

SEQ ID NO: 47401 - protein, 12 aa, synthetic construct
AAWGYTNGWLKI

SEQ ID NO: 47402 - protein, 12 aa, synthetic construct
AAWGYTNGWVKI

SEQ ID NO: 47403 - protein, 12 aa, synthetic construct
AAWGYTPGWFEI

SEQ ID NO: 47404 - protein, 12 aa, synthetic construct
AAWGYTTGCFKI

SEQ ID NO: 47405 - protein, 12 aa, synthetic construct
AAWGYTTGGFKI

SEQ ID NO: 47406 - protein, 12 aa, synthetic construct
AAWGYTTGGVKI

SEQ ID NO: 47407 - protein, 12 aa, synthetic construct
SGWEYNTCWFKK

SEQ ID NO: 47408 - protein, 12 aa, synthetic construct
AAWGYTTGWFKR

SEQ ID NO: 47409 - protein, 14 aa, synthetic construct
AAWGYGPSTGWFKI

SEQ ID NO: 47410 - protein, 13 aa, synthetic construct
AAWGYFNTGWFKI

SEQ ID NO: 47411 - protein, 13 aa, synthetic construct
AAWGYEVTGWFKI

SEQ ID NO: 47412 - protein, 14 aa, synthetic construct
AAWGYEETSGWFKI

SEQ ID NO: 47413 - protein, 12 aa, synthetic construct
AAWGVTTCWLKI

SEQ ID NO: 47414 - protein, 12 aa, synthetic construct
AAWGVTTGRFKI

SEQ ID NO: 47415 - protein, 10 aa, synthetic construct
AAWGVTTGWF

SEQ ID NO: 47416 - protein, 11 aa, synthetic construct
SSGDTTGCLKI

SEQ ID NO: 47417 - protein, 7 aa, synthetic construct
SLGYKKL

SEQ ID NO: 47418 - protein, 12 aa, synthetic construct
AAWGVTTGWFKL

SEQ ID NO: 47419 - protein, 12 aa, synthetic construct
AAWGVTTGWFKM

SEQ ID NO: 47420 - protein, 12 aa, synthetic construct
AAWGVTTGWFNI

SEQ ID NO: 47421 - protein, 12 aa, synthetic construct
AAWGVTTGWFQI

SEQ ID NO: 47422 - protein, 12 aa, synthetic construct
AAWGVTTGWSKI

SEQ ID NO: 47423 - protein, 9 aa, synthetic construct
AAWGVWFKI

SEQ ID NO: 47424 - protein, 12 aa, synthetic construct
AAWGWATGWFKI

SEQ ID NO: 47425 - protein, 12 aa, synthetic construct
AAWGWATGWFTM

SEQ ID NO: 47426 - protein, 8 aa, synthetic construct
AAWGWFKL

SEQ ID NO: 47427 - protein, 8 aa, synthetic construct
AAWGWLKI

SEQ ID NO: 47428 - protein, 13 aa, synthetic construct
AAWGWRAPGWFKI

SEQ ID NO: 47429 - protein, 12 aa, synthetic construct
AAWGWTTGWFKI

SEQ ID NO: 47430 - protein, 8 aa, synthetic construct
AAWGWVKI

SEQ ID NO: 47431 - protein, 8 aa, synthetic construct
AAWGWVQI

SEQ ID NO: 47432 - protein, 12 aa, synthetic construct
AAWGYTTGWFKT

SEQ ID NO: 47433 - protein, 12 aa, synthetic construct
AAWGYTTGWSNI

SEQ ID NO: 47434 - protein, 12 aa, synthetic construct
AAWGYTTGWVKI

SEQ ID NO: 47435 - protein, 11 aa, synthetic construct
AAWIRTGWFKI

SEQ ID NO: 47436 - protein, 10 aa, synthetic construct
AAWITGWFKV

SEQ ID NO: 47437 - protein, 10 aa, synthetic construct
AAWITGWFQI

SEQ ID NO: 47438 - protein, 10 aa, synthetic construct
AAWITGWSKI

SEQ ID NO: 47439 - protein, 11 aa, synthetic construct
AAWKCTGWFKI

SEQ ID NO: 47440 - protein, 9 aa, synthetic construct
AAWKEYNKL

SEQ ID NO: 47441 - protein, 11 aa, synthetic construct
AAWKGAGWFKI

SEQ ID NO: 47442 - protein, 11 aa, synthetic construct
AAWKPPGWFEI

SEQ ID NO: 47443 - protein, 10 aa, synthetic construct
AAWLPGWFKI

SEQ ID NO: 47444 - protein, 11 aa, synthetic construct
AAWLTTGWFKI

SEQ ID NO: 47445 - protein, 9 aa, synthetic construct
AAWNGWLKI

SEQ ID NO: 47446 - protein, 11 aa, synthetic construct
AAWNTTDWFKI

SEQ ID NO: 47447 - protein, 11 aa, synthetic construct
SEWEKTCWFKI

SEQ ID NO: 47448 - protein, 11 aa, synthetic construct
AAWNTTGWFNI

SEQ ID NO: 47449 - protein, 11 aa, synthetic construct
AAWNTTGWFQI

SEQ ID NO: 47450 - protein, 11 aa, synthetic construct
AAWNTTGWLKI

SEQ ID NO: 47451 - protein, 11 aa, synthetic construct
AAWNTTGWVKI

SEQ ID NO: 47452 - protein, 11 aa, synthetic construct
AAWNTTSWFKI

SEQ ID NO: 47453 - protein, 13 aa, synthetic construct
AAWNWRATGWFKI

SEQ ID NO: 47454 - protein, 11 aa, synthetic construct
AAWNYAGWFKI

SEQ ID NO: 47455 - protein, 10 aa, synthetic construct
AAWITGLFKI

SEQ ID NO: 47456 - protein, 12 aa, synthetic construct
AAWIRATGWFKI

SEQ ID NO: 47457 - protein, 14 aa, synthetic construct
AAWGYTYTTGWFKI

SEQ ID NO: 47458 - protein, 11 aa, synthetic construct
AAWIPTGWFKI

SEQ ID NO: 47459 - protein, 9 aa, synthetic construct
AAWGYWFKI

SEQ ID NO: 47460 - protein, 14 aa, synthetic construct
AAWGYWYTTGWFKI

SEQ ID NO: 47461 - protein, 9 aa, synthetic construct
AAWGYYKKI

SEQ ID NO: 47462 - protein, 10 aa, synthetic construct
AAWGYYYKEL

SEQ ID NO: 47463 - protein, 9 aa, synthetic construct
AAWGYYYKK

SEQ ID NO: 47464 - protein, 10 aa, synthetic construct
AAWGYYYKKI

SEQ ID NO: 47465 - protein, 11 aa, synthetic construct
AAWHNTGWFKI

SEQ ID NO: 47466 - protein, 11 aa, synthetic construct
SEWYTTCWFKI

SEQ ID NO: 47467 - protein, 11 aa, synthetic construct
AAWHTAGWFKI

SEQ ID NO: 47468 - protein, 11 aa, synthetic construct
AAWHTPGWFKI

SEQ ID NO: 47469 - protein, 11 aa, synthetic construct
AAWHTTGRLKK

SEQ ID NO: 47470 - protein, 11 aa, synthetic construct
AAWHTTGWFKK

SEQ ID NO: 47471 - protein, 15 aa, synthetic construct
SEWVHEGYTTGLFKI

SEQ ID NO: 47472 - protein, 9 aa, synthetic construct
AAWIGWLKI

SEQ ID NO: 47473 - protein, 11 aa, synthetic construct
AAWIITGWFKI

SEQ ID NO: 47474 - protein, 12 aa, synthetic construct
AAWIITTGWFKI

SEQ ID NO: 47475 - protein, 11 aa, synthetic construct
AAWIKGGWFKI

SEQ ID NO: 47476 - protein, 13 aa, synthetic construct
AAWIKMTTGWFKI

SEQ ID NO: 47477 - protein, 10 aa, synthetic construct
AAWINGWLKI

SEQ ID NO: 47478 - protein, 11 aa, synthetic construct
SAWGTTCWFKI

SEQ ID NO: 47479 - protein, 9 aa, synthetic construct
AAWVRWFNI

SEQ ID NO: 47480 - protein, 10 aa, synthetic construct
SAWGTGWLKI

SEQ ID NO: 47481 - protein, 14 aa, synthetic construct
AGWDTDGPTGWFKI

SEQ ID NO: 47482 - protein, 10 aa, synthetic construct
AGWDGGWFKI

SEQ ID NO: 47483 - protein, 10 aa, synthetic construct
AGWDGGWFKV

SEQ ID NO: 47484 - protein, 11 aa, synthetic construct
AGWDLTGWFKI

SEQ ID NO: 47485 - protein, 8 aa, synthetic construct
AGWDRGKI

SEQ ID NO: 47486 - protein, 12 aa, synthetic construct
AGWDRGTGCFNI

SEQ ID NO: 47487 - protein, 12 aa, synthetic construct
AGWDRGTGWFKI

SEQ ID NO: 47488 - protein, 11 aa, synthetic construct
AGWDSGGWFKI

SEQ ID NO: 47489 - protein, 11 aa, synthetic construct
AGWDSNYYKKL

SEQ ID NO: 47490 - protein, 12 aa, synthetic construct
AGWDSTPGWFKI

SEQ ID NO: 47491 - protein, 12 aa, synthetic construct
AGWDYITGWVKI

SEQ ID NO: 47492 - protein, 10 aa, synthetic construct
AFHTTGWFKI

SEQ ID NO: 47493 - protein, 11 aa, synthetic construct
AGWEATGWLKI

SEQ ID NO: 47494 - protein, 10 aa, synthetic construct
AGWGPGWFGL

SEQ ID NO: 47495 - protein, 10 aa, synthetic construct
AGWGTGWFKL

SEQ ID NO: 47496 - protein, 12 aa, synthetic construct
AGWGYNTGWLKI

SEQ ID NO: 47497 - protein, 12 aa, synthetic construct
AGWGYTTGWFKI

SEQ ID NO: 47498 - protein, 12 aa, synthetic construct
SAWERTTGWFKI

SEQ ID NO: 47499 - protein, 10 aa, synthetic construct
AGWITGWFKI

SEQ ID NO: 47500 - protein, 12 aa, synthetic construct
AGWVGGTGWFKI

SEQ ID NO: 47501 - protein, 10 aa, synthetic construct
AGWVTGWFKI

SEQ ID NO: 47502 - protein, 11 aa, synthetic construct
AGWDFPGWFKI

SEQ ID NO: 47503 - protein, 12 aa, synthetic construct
AGWDFGTGWMKI

SEQ ID NO: 47504 - protein, 12 aa, synthetic construct
AGWDFGTGWFNI

SEQ ID NO: 47505 - protein, 11 aa, synthetic construct
AGWDCTGWFKI

SEQ ID NO: 47506 - protein, 10 aa, synthetic construct
AFYNTGWFKK

SEQ ID NO: 47507 - protein, 10 aa, synthetic construct
AFYTPGWFKI

SEQ ID NO: 47508 - protein, 10 aa, synthetic construct
AFYTTGRFKI

SEQ ID NO: 47509 - protein, 11 aa, synthetic construct
SAWESTGWFKI

SEQ ID NO: 47510 - protein, 10 aa, synthetic construct
AFYTTGWSKI

SEQ ID NO: 47511 - protein, 10 aa, synthetic construct
AFYTTGWYKI

SEQ ID NO: 47512 - protein, 10 aa, synthetic construct
AGDTTGWVKI

SEQ ID NO: 47513 - protein, 9 aa, synthetic construct
AGGGGWFKI

SEQ ID NO: 47514 - protein, 8 aa, synthetic construct
AGIPYKKL

SEQ ID NO: 47515 - protein, 13 aa, synthetic construct
AGLAKYNKGWFKI

SEQ ID NO: 47516 - protein, 12 aa, synthetic construct
AGLDSATGLLKI

SEQ ID NO: 47517 - protein, 10 aa, synthetic construct
AGNFTGLLKI

SEQ ID NO: 47518 - protein, 10 aa, synthetic construct
AGNITGWFKI

SEQ ID NO: 47519 - protein, 10 aa, synthetic construct
AGNNTGWFNI

SEQ ID NO: 47520 - protein, 10 aa, synthetic construct
AGNTTGWFKT

SEQ ID NO: 47521 - protein, 10 aa, synthetic construct
AGNTTGWFNI

SEQ ID NO: 47522 - protein, 9 aa, synthetic construct
AGPTGWFKV

SEQ ID NO: 47523 - protein, 12 aa, synthetic construct
AGRDFRGFWFKI

SEQ ID NO: 47524 - protein, 10 aa, synthetic construct
AGTTTGWFKI

SEQ ID NO: 47525 - protein, 9 aa, synthetic construct
AINTGRLKI

SEQ ID NO: 47526 - protein, 10 aa, synthetic construct
AIYTTGWFKI

SEQ ID NO: 47527 - protein, 10 aa, synthetic construct
AKNTTGWFQI

SEQ ID NO: 47528 - protein, 12 aa, synthetic construct
SAWENNTGWFKI

SEQ ID NO: 47529 - protein, 10 aa, synthetic construct
ANSTTGWFKI

SEQ ID NO: 47530 - protein, 10 aa, synthetic construct
APDTTGWFKI

SEQ ID NO: 47531 - protein, 8 aa, synthetic construct
APNYYKKL

SEQ ID NO: 47532 - protein, 12 aa, synthetic construct
APWDDTTGCFKI

SEQ ID NO: 47533 - protein, 12 aa, synthetic construct
SAWEDTTGWFKI

SEQ ID NO: 47534 - protein, 8 aa, synthetic construct
ASCGWFKI

SEQ ID NO: 47535 - protein, 7 aa, synthetic construct
ASCPFKI

SEQ ID NO: 47536 - protein, 9 aa, synthetic construct
ASGAEYKKI

SEQ ID NO: 47537 - protein, 10 aa, synthetic construct
ASGDCGWFKI

SEQ ID NO: 47538 - protein, 11 aa, synthetic construct
ASGDTTGWFKI

SEQ ID NO: 47539 - protein, 10 aa, synthetic construct
ASGRCGWFKK

SEQ ID NO: 47540 - protein, 7 aa, synthetic construct
ASGSKKL

SEQ ID NO: 47541 - protein, 11 aa, synthetic construct
ASGYNTGWFKI

SEQ ID NO: 47542 - protein, 12 aa, synthetic construct
ASLALTTGLLKI

SEQ ID NO: 47543 - protein, 12 aa, synthetic construct
ASLARTPGWFKI

SEQ ID NO: 47544 - protein, 12 aa, synthetic construct
ASLDDTTGWFKI

SEQ ID NO: 47545 - protein, 12 aa, synthetic construct
ASLDYGTGWFKI

SEQ ID NO: 47546 - protein, 12 aa, synthetic construct
ASLDYHTGWLKI

SEQ ID NO: 47547 - protein, 12 aa, synthetic construct
ASLDYSPGWFKI

SEQ ID NO: 47548 - protein, 10 aa, synthetic construct
ANNTTGWFQI

SEQ ID NO: 47549 - protein, 10 aa, synthetic construct
ANNTTCWFKI

SEQ ID NO: 47550 - protein, 14 aa, synthetic construct
AKWDSGGTTGWFKI

SEQ ID NO: 47551 - protein, 10 aa, synthetic construct
ANNTTAWFKI

SEQ ID NO: 47552 - protein, 12 aa, synthetic construct
AKWDYNTVWFKI

SEQ ID NO: 47553 - protein, 10 aa, synthetic construct
AKYTTGWFQI

SEQ ID NO: 47554 - protein, 15 aa, synthetic construct
SAWERKGYTTGWFKI

SEQ ID NO: 47555 - protein, 7 aa, synthetic construct
ALGDKKL

SEQ ID NO: 47556 - protein, 11 aa, synthetic construct
ALGENTGCFKI

SEQ ID NO: 47557 - protein, 7 aa, synthetic construct
ALGNKKL

SEQ ID NO: 47558 - protein, 7 aa, synthetic construct
ALGYKRL

SEQ ID NO: 47559 - protein, 7 aa, synthetic construct
ALGYNKL

SEQ ID NO: 47560 - protein, 9 aa, synthetic construct
ALNTGWFKI

SEQ ID NO: 47561 - protein, 9 aa, synthetic construct
ALSTGLFKI

SEQ ID NO: 47562 - protein, 9 aa, synthetic construct
ALTAGWFKI

SEQ ID NO: 47563 - protein, 8 aa, synthetic construct
ALTTGCSR

SEQ ID NO: 47564 - protein, 9 aa, synthetic construct
ALTTGGFKI

SEQ ID NO: 47565 - protein, 12 aa, synthetic construct
SAWENTTGWFNI

SEQ ID NO: 47566 - protein, 9 aa, synthetic construct
ALTTGWFKL

SEQ ID NO: 47567 - protein, 9 aa, synthetic construct
ALTTGWFNI

SEQ ID NO: 47568 - protein, 9 aa, synthetic construct
ALTTGWVQI

SEQ ID NO: 47569 - protein, 10 aa, synthetic construct
ANKTTGWFKI

SEQ ID NO: 47570 - protein, 10 aa, synthetic construct
ANNNTGWFKI

SEQ ID NO: 47571 - protein, 10 aa, synthetic construct
AFYNTGWFKI

SEQ ID NO: 47572 - protein, 11 aa, synthetic construct
SAWETTGLFKI

SEQ ID NO: 47573 - protein, 12 aa, synthetic construct
AAWVSTPGWFKI

SEQ ID NO: 47574 - protein, 11 aa, synthetic construct
AAWYTSGWFKI

SEQ ID NO: 47575 - protein, 11 aa, synthetic construct
AAWYFTGWFKI

SEQ ID NO: 47576 - protein, 12 aa, synthetic construct
SAWGGTTGWFKI

SEQ ID NO: 47577 - protein, 12 aa, synthetic construct
AAWYGATGWFKI

SEQ ID NO: 47578 - protein, 11 aa, synthetic construct
AAWYNTCWFKI

SEQ ID NO: 47579 - protein, 11 aa, synthetic construct
AAWYNTGWLKI

SEQ ID NO: 47580 - protein, 11 aa, synthetic construct
AAWYPTGWFKI

SEQ ID NO: 47581 - protein, 12 aa, synthetic construct
SAWGDTTGWFKL

SEQ ID NO: 47582 - protein, 11 aa, synthetic construct
AAWYTHGWFKI

SEQ ID NO: 47583 - protein, 11 aa, synthetic construct
AAWYTNCWFKI

SEQ ID NO: 47584 - protein, 12 aa, synthetic construct
SAWEYTTGWLKI

SEQ ID NO: 47585 - protein, 10 aa, synthetic construct
AFDTPGWFKI

SEQ ID NO: 47586 - protein, 11 aa, synthetic construct
AAWYTTCWLKI

SEQ ID NO: 47587 - protein, 11 aa, synthetic construct
AAWYTTGGFKI

SEQ ID NO: 47588 - protein, 11 aa, synthetic construct
AAWYTTGLFKI

SEQ ID NO: 47589 - protein, 12 aa, synthetic construct
SAWEYNTGWFKI

SEQ ID NO: 47590 - protein, 11 aa, synthetic construct
AAWYTTGWFKL

SEQ ID NO: 47591 - protein, 11 aa, synthetic construct
AAWYTTGWFKT

SEQ ID NO: 47592 - protein, 10 aa, synthetic construct
AAWYTTGWLR

SEQ ID NO: 47593 - protein, 12 aa, synthetic construct
AAWYWTTGWFKI

SEQ ID NO: 47594 - protein, 12 aa, synthetic construct
AAWYYTPGWFKI

SEQ ID NO: 47595 - protein, 12 aa, synthetic construct
AAWYDTTGWFNI

SEQ ID NO: 47596 - protein, 12 aa, synthetic construct
AAWYDTTGWFKI

SEQ ID NO: 47597 - protein, 12 aa, synthetic construct
AAWWYTTGWFKI

SEQ ID NO: 47598 - protein, 11 aa, synthetic construct
AAWWNTGWFNI

SEQ ID NO: 47599 - protein, 12 aa, synthetic construct
AAWVSTTGWFKK

SEQ ID NO: 47600 - protein, 12 aa, synthetic construct
AAWVSTTGWLKI

SEQ ID NO: 47601 - protein, 10 aa, synthetic construct
AAWVTGCFKI

SEQ ID NO: 47602 - protein, 10 aa, synthetic construct
AAWVTGWFEI

SEQ ID NO: 47603 - protein, 10 aa, synthetic construct
SAWGTGWFKI

SEQ ID NO: 47604 - protein, 10 aa, synthetic construct
AAWVTGWFKM

SEQ ID NO: 47605 - protein, 10 aa, synthetic construct
AAWVTGWFKT

SEQ ID NO: 47606 - protein, 10 aa, synthetic construct
AAWVTGWFNK

SEQ ID NO: 47607 - protein, 10 aa, synthetic construct
SAWGTCLLKI

SEQ ID NO: 47608 - protein, 10 aa, synthetic construct
AAWVTGWFTI

SEQ ID NO: 47609 - protein, 8 aa, synthetic construct
AAWVYEKL

SEQ ID NO: 47610 - protein, 13 aa, synthetic construct
AAWVYMATGWFKI

SEQ ID NO: 47611 - protein, 8 aa, synthetic construct
AAWVYTTG

SEQ ID NO: 47612 - protein, 13 aa, synthetic construct
SAWGNYTTGWFKI

SEQ ID NO: 47613 - protein, 12 aa, synthetic construct
AAWVYTTGWVNI

SEQ ID NO: 47614 - protein, 9 aa, synthetic construct
AAWVYYKKL

SEQ ID NO: 47615 - protein, 7 aa, synthetic construct
AAWWFKI

SEQ ID NO: 47616 - protein, 12 aa, synthetic construct
AAWWGTTGWFKI

SEQ ID NO: 47617 - protein, 9 aa, synthetic construct
AAWWGWFKI

SEQ ID NO: 47618 - protein, 12 aa, synthetic construct
AAYAHTTGWLKI

SEQ ID NO: 47619 - protein, 10 aa, synthetic construct
AAYATGWFKI

SEQ ID NO: 47620 - protein, 10 aa, synthetic construct
ADNTTGWFKI

SEQ ID NO: 47621 - protein, 11 aa, synthetic construct
AEWDSTGWFMI

SEQ ID NO: 47622 - protein, 11 aa, synthetic construct
AEWDTPGWFKI

SEQ ID NO: 47623 - protein, 11 aa, synthetic construct
AEWDTTGCFRI

SEQ ID NO: 47624 - protein, 11 aa, synthetic construct
AEWDTTGWFKI

SEQ ID NO: 47625 - protein, 11 aa, synthetic construct
AEWDTTGWFNI

SEQ ID NO: 47626 - protein, 11 aa, synthetic construct
AEWDTTGWLQI

SEQ ID NO: 47627 - protein, 12 aa, synthetic construct
AEWDVGTGWFKI

SEQ ID NO: 47628 - protein, 13 aa, synthetic construct
AEWDYFTTWWFKI

SEQ ID NO: 47629 - protein, 11 aa, synthetic construct
AEWDYLGWFKI

SEQ ID NO: 47630 - protein, 12 aa, synthetic construct
AEWDYNTGWFKI

SEQ ID NO: 47631 - protein, 12 aa, synthetic construct
AEWENTTGWFNI

SEQ ID NO: 47632 - protein, 12 aa, synthetic construct
AEWGITTGWLKI

SEQ ID NO: 47633 - protein, 10 aa, synthetic construct
AEWGNGCLKI

SEQ ID NO: 47634 - protein, 13 aa, synthetic construct
AEWGSYTTGWFNI

SEQ ID NO: 47635 - protein, 12 aa, synthetic construct
AEWGYNTGWLKI

SEQ ID NO: 47636 - protein, 12 aa, synthetic construct
AEWGYTTCWLKI

SEQ ID NO: 47637 - protein, 10 aa, synthetic construct
AEWPTGWFKI

SEQ ID NO: 47638 - protein, 9 aa, synthetic construct
AEWTGWFKI

SEQ ID NO: 47639 - protein, 10 aa, synthetic construct
AEWTTGLFKI

SEQ ID NO: 47640 - protein, 10 aa, synthetic construct
AEWVTGWFKI

SEQ ID NO: 47641 - protein, 9 aa, synthetic construct
AEWDSYKKI

SEQ ID NO: 47642 - protein, 11 aa, synthetic construct
AEWDSGGCFKK

SEQ ID NO: 47643 - protein, 9 aa, synthetic construct
ADWAYYKKL

SEQ ID NO: 47644 - protein, 11 aa, synthetic construct
AEWDNTGLFKI

SEQ ID NO: 47645 - protein, 12 aa, synthetic construct
ADWDFGPGCFKI

SEQ ID NO: 47646 - protein, 9 aa, synthetic construct
SAWEVYKKI

SEQ ID NO: 47647 - protein, 9 aa, synthetic construct
AEGAEYNKH

SEQ ID NO: 47648 - protein, 11 aa, synthetic construct
AEGDDTGWFNK

SEQ ID NO: 47649 - protein, 12 aa, synthetic construct
AEGDRGTGCFKI

SEQ ID NO: 47650 - protein, 13 aa, synthetic construct
AEGGYGYNGLFNI

SEQ ID NO: 47651 - protein, 7 aa, synthetic construct
AEGREKL

SEQ ID NO: 47652 - protein, 7 aa, synthetic construct
AEGSKKL

SEQ ID NO: 47653 - protein, 11 aa, synthetic construct
AELAYKGWFKI

SEQ ID NO: 47654 - protein, 12 aa, synthetic construct
AELDYTTGWLKI

SEQ ID NO: 47655 - protein, 10 aa, synthetic construct
AELGTGWLKI

SEQ ID NO: 47656 - protein, 12 aa, synthetic construct
AELGYTNGWLKI

SEQ ID NO: 47657 - protein, 11 aa, synthetic construct
AELNNTGLFKI

SEQ ID NO: 47658 - protein, 12 aa, synthetic construct
AERALHTGWFKI

SEQ ID NO: 47659 - protein, 8 aa, synthetic construct
AEWADKKL

SEQ ID NO: 47660 - protein, 12 aa, synthetic construct
AEWAKTTGWFKK

SEQ ID NO: 47661 - protein, 12 aa, synthetic construct
AEWALTTGWFKI

SEQ ID NO: 47662 - protein, 11 aa, synthetic construct
AEWDHPGWFKI

SEQ ID NO: 47663 - protein, 12 aa, synthetic construct
AEWDLGTGLLNI

SEQ ID NO: 47664 - protein, 12 aa, synthetic construct
AAWSSTTGWFEI

SEQ ID NO: 47665 - protein, 11 aa, synthetic construct
AAWDWNGCFKI

SEQ ID NO: 47666 - protein, 13 aa, synthetic construct
AAWEGNTTGGFKI

SEQ ID NO: 47667 - protein, 19 aa, synthetic construct
AASHIPLVGSRYTTGWFKI

SEQ ID NO: 47668 - protein, 12 aa, synthetic construct
AASIDTTDWFKI

SEQ ID NO: 47669 - protein, 12 aa, synthetic construct
AASIDTTGGFKI

SEQ ID NO: 47670 - protein, 12 aa, synthetic construct
AASIDTTGWFNI

SEQ ID NO: 47671 - protein, 12 aa, synthetic construct
AASIDTTGWLKI

SEQ ID NO: 47672 - protein, 12 aa, synthetic construct
AASIDTTSWFKI

SEQ ID NO: 47673 - protein, 12 aa, synthetic construct
AASIGTTGWFKI

SEQ ID NO: 47674 - protein, 12 aa, synthetic construct
AASIVTTGWFKI

SEQ ID NO: 47675 - protein, 10 aa, synthetic construct
AASSTGWFKI

SEQ ID NO: 47676 - protein, 11 aa, synthetic construct
AASSTTGWFKI

SEQ ID NO: 47677 - protein, 8 aa, synthetic construct
AATGGFKI

SEQ ID NO: 47678 - protein, 8 aa, synthetic construct
AATGWIKI

SEQ ID NO: 47679 - protein, 10 aa, synthetic construct
AATTPGWFKI

SEQ ID NO: 47680 - protein, 13 aa, synthetic construct
AAVDEETTSWFKI

SEQ ID NO: 47681 - protein, 11 aa, synthetic construct
AAVDIGGWFKI

SEQ ID NO: 47682 - protein, 12 aa, synthetic construct
AAVDLGTGWLKI

SEQ ID NO: 47683 - protein, 12 aa, synthetic construct
AAVEHTQGLYKI

SEQ ID NO: 47684 - protein, 8 aa, synthetic construct
AAVGWFKI

SEQ ID NO: 47685 - protein, 10 aa, synthetic construct
AAVTTGWFKI

SEQ ID NO: 47686 - protein, 10 aa, synthetic construct
AAVTTGWFQI

SEQ ID NO: 47687 - protein, 11 aa, synthetic construct
AASHTTGWCKK

SEQ ID NO: 47688 - protein, 11 aa, synthetic construct
AASGTTGWVGL

SEQ ID NO: 47689 - protein, 11 aa, synthetic construct
AAVYTTGWFRI

SEQ ID NO: 47690 - protein, 11 aa, synthetic construct
AASGTTGWFKI

SEQ ID NO: 47691 - protein, 12 aa, synthetic construct
AARRYTTGWFKI

SEQ ID NO: 47692 - protein, 10 aa, synthetic construct
AARSTGWLKI

SEQ ID NO: 47693 - protein, 10 aa, synthetic construct
AARTTGWFKI

SEQ ID NO: 47694 - protein, 11 aa, synthetic construct
AARTTTGWFKI

SEQ ID NO: 47695 - protein, 10 aa, synthetic construct
AARVHYYKKL

SEQ ID NO: 47696 - protein, 10 aa, synthetic construct
AARVTGWFKI

SEQ ID NO: 47697 - protein, 10 aa, synthetic construct
AASAPDWFKI

SEQ ID NO: 47698 - protein, 10 aa, synthetic construct
AASAPGWFKI

SEQ ID NO: 47699 - protein, 10 aa, synthetic construct
AASATGWFKL

SEQ ID NO: 47700 - protein, 10 aa, synthetic construct
AASATGWLKI

SEQ ID NO: 47701 - protein, 11 aa, synthetic construct
AASDAPGWFQI

SEQ ID NO: 47702 - protein, 11 aa, synthetic construct
AASDATGWFKI

SEQ ID NO: 47703 - protein, 11 aa, synthetic construct
AASDNTCWVKI

SEQ ID NO: 47704 - protein, 11 aa, synthetic construct
AASDNTGWFKI

SEQ ID NO: 47705 - protein, 11 aa, synthetic construct
AASDTPGWFKI

SEQ ID NO: 47706 - protein, 11 aa, synthetic construct
AASDTTGWFKV

SEQ ID NO: 47707 - protein, 11 aa, synthetic construct
AASDTTGWLKI

SEQ ID NO: 47708 - protein, 11 aa, synthetic construct
AASDTTGWYNI

SEQ ID NO: 47709 - protein, 11 aa, synthetic construct
AASDTTRWLKI

SEQ ID NO: 47710 - protein, 11 aa, synthetic construct
AAVYNTGWFKI

SEQ ID NO: 47711 - protein, 11 aa, synthetic construct
AAVYTTGWSKI

SEQ ID NO: 47712 - protein, 11 aa, synthetic construct
AARNTTGWFKI

SEQ ID NO: 47713 - protein, 11 aa, synthetic construct
AAWADTGWFDR

SEQ ID NO: 47714 - protein, 12 aa, synthetic construct
AAWADTSGWFKI

SEQ ID NO: 47715 - protein, 12 aa, synthetic construct
AAWADTTGGFKI

SEQ ID NO: 47716 - protein, 12 aa, synthetic construct
AAWADTTGWSKI

SEQ ID NO: 47717 - protein, 12 aa, synthetic construct
AAWADTTGWVKI

SEQ ID NO: 47718 - protein, 9 aa, synthetic construct
AAWADWFAI

SEQ ID NO: 47719 - protein, 13 aa, synthetic construct
AAWAEYTTGWFNI

SEQ ID NO: 47720 - protein, 12 aa, synthetic construct
AAWAFATGWFKI

SEQ ID NO: 47721 - protein, 9 aa, synthetic construct
AAWAFDNKL

SEQ ID NO: 47722 - protein, 11 aa, synthetic construct
AAWAFPGWFKI

SEQ ID NO: 47723 - protein, 11 aa, synthetic construct
AAWAFPSNKKL

SEQ ID NO: 47724 - protein, 11 aa, synthetic construct
AAWAFRYYKKL

SEQ ID NO: 47725 - protein, 11 aa, synthetic construct
AAWAFTGWFKI

SEQ ID NO: 47726 - protein, 12 aa, synthetic construct
AAWAGGTGGFKI

SEQ ID NO: 47727 - protein, 10 aa, synthetic construct
AAWAGGWFKI

SEQ ID NO: 47728 - protein, 13 aa, synthetic construct
AAWAGNTPGWFKI

SEQ ID NO: 47729 - protein, 12 aa, synthetic construct
AAWAHATGWFKI

SEQ ID NO: 47730 - protein, 10 aa, synthetic construct
AAWAHFYKKL

SEQ ID NO: 47731 - protein, 12 aa, synthetic construct
AAWAHNTGWFKI

SEQ ID NO: 47732 - protein, 12 aa, synthetic construct
AAWAHSTGWFKI

SEQ ID NO: 47733 - protein, 11 aa, synthetic construct
AAWADTGWFKI

SEQ ID NO: 47734 - protein, 12 aa, synthetic construct
AAWADRTGWFKI

SEQ ID NO: 47735 - protein, 14 aa, synthetic construct
AAWAAGATTGWFKI

SEQ ID NO: 47736 - protein, 13 aa, synthetic construct
AAWADRPTGWFKI

SEQ ID NO: 47737 - protein, 10 aa, synthetic construct
AAWAAGGFKI

SEQ ID NO: 47738 - protein, 11 aa, synthetic construct
AAWAATGWFKI

SEQ ID NO: 47739 - protein, 12 aa, synthetic construct
AAWAATTGGFKI

SEQ ID NO: 47740 - protein, 10 aa, synthetic construct
AAWAAYYKKL

SEQ ID NO: 47741 - protein, 11 aa, synthetic construct
AAWACAGWFKI

SEQ ID NO: 47742 - protein, 12 aa, synthetic construct
AAWACATGWFKI

SEQ ID NO: 47743 - protein, 10 aa, synthetic construct
AAWACGWIKI

SEQ ID NO: 47744 - protein, 12 aa, synthetic construct
AAWACRGGWFQI

SEQ ID NO: 47745 - protein, 11 aa, synthetic construct
AAWACTGWFKI

SEQ ID NO: 47746 - protein, 11 aa, synthetic construct
AAWACTGWLQI

SEQ ID NO: 47747 - protein, 12 aa, synthetic construct
AAWACTTGWFQI

SEQ ID NO: 47748 - protein, 13 aa, synthetic construct
AAWACVPTGWFKI

SEQ ID NO: 47749 - protein, 8 aa, synthetic construct
AAWADKKH

SEQ ID NO: 47750 - protein, 8 aa, synthetic construct
AAWADKKN

SEQ ID NO: 47751 - protein, 8 aa, synthetic construct
AAWADKKQ

SEQ ID NO: 47752 - protein, 12 aa, synthetic construct
AAWADKPGWFNV

SEQ ID NO: 47753 - protein, 8 aa, synthetic construct
AAWADNKL

SEQ ID NO: 47754 - protein, 12 aa, synthetic construct
AAWADNTCLLKI

SEQ ID NO: 47755 - protein, 12 aa, synthetic construct
AAWADNTGWLKI

SEQ ID NO: 47756 - protein, 10 aa, synthetic construct
AARPTGWFKI

SEQ ID NO: 47757 - protein, 12 aa, synthetic construct
AARLYTTGWFNI

SEQ ID NO: 47758 - protein, 13 aa, synthetic construct
AAWDCRATGWFKI

SEQ ID NO: 47759 - protein, 9 aa, synthetic construct
AAPTGGFKI

SEQ ID NO: 47760 - protein, 11 aa, synthetic construct
AAPTTPGWFQI

SEQ ID NO: 47761 - protein, 11 aa, synthetic construct
AAPYTPGWFKI

SEQ ID NO: 47762 - protein, 11 aa, synthetic construct
AAPYTTCWFKI

SEQ ID NO: 47763 - protein, 11 aa, synthetic construct
AAPYTTGWCQV

SEQ ID NO: 47764 - protein, 11 aa, synthetic construct
AAPYTTGWFKL

SEQ ID NO: 47765 - protein, 11 aa, synthetic construct
AAPYTTGWFQI

SEQ ID NO: 47766 - protein, 11 aa, synthetic construct
AAPYTTGWVKI

SEQ ID NO: 47767 - protein, 12 aa, synthetic construct
AARADTTGWFKI

SEQ ID NO: 47768 - protein, 12 aa, synthetic construct
AARAHTTGWFKI

SEQ ID NO: 47769 - protein, 12 aa, synthetic construct
AARALTPGLFKI

SEQ ID NO: 47770 - protein, 14 aa, synthetic construct
AARAPLYTTGWFKI

SEQ ID NO: 47771 - protein, 11 aa, synthetic construct
AARATTGWFKI

SEQ ID NO: 47772 - protein, 13 aa, synthetic construct
AARDDDTTGWFKI

SEQ ID NO: 47773 - protein, 12 aa, synthetic construct
AARDDTTGWFKI

SEQ ID NO: 47774 - protein, 13 aa, synthetic construct
AARDEETTGWFKI

SEQ ID NO: 47775 - protein, 12 aa, synthetic construct
AARDFATGWFKI

SEQ ID NO: 47776 - protein, 11 aa, synthetic construct
AARDFPSNKKL

SEQ ID NO: 47777 - protein, 13 aa, synthetic construct
AARDFRTTGWFKI

SEQ ID NO: 47778 - protein, 9 aa, synthetic construct
AARDFWLKI

SEQ ID NO: 47779 - protein, 9 aa, synthetic construct
AAPTGWFRI

SEQ ID NO: 47780 - protein, 11 aa, synthetic construct
AAPNTTSWFKI

SEQ ID NO: 47781 - protein, 8 aa, synthetic construct
AARDLGKI

SEQ ID NO: 47782 - protein, 11 aa, synthetic construct
AAPNTTGWLKI

SEQ ID NO: 47783 - protein, 13 aa, synthetic construct
AALSGNNTGWFKI

SEQ ID NO: 47784 - protein, 10 aa, synthetic construct
AALTTGLCNI

SEQ ID NO: 47785 - protein, 10 aa, synthetic construct
AALTTGWFKI

SEQ ID NO: 47786 - protein, 10 aa, synthetic construct
AALVTGWFKI

SEQ ID NO: 47787 - protein, 11 aa, synthetic construct
AALYTTGCFKI

SEQ ID NO: 47788 - protein, 12 aa, synthetic construct
AAMAHTTGLLNI

SEQ ID NO: 47789 - protein, 10 aa, synthetic construct
AANNTGWFKI

SEQ ID NO: 47790 - protein, 10 aa, synthetic construct
AANTKGWFKI

SEQ ID NO: 47791 - protein, 9 aa, synthetic construct
AANTTGGSG

SEQ ID NO: 47792 - protein, 10 aa, synthetic construct
AANTTGWFEI

SEQ ID NO: 47793 - protein, 10 aa, synthetic construct
AANTTGWFNK

SEQ ID NO: 47794 - protein, 10 aa, synthetic construct
AANTTGWSKI

SEQ ID NO: 47795 - protein, 11 aa, synthetic construct
AAPDTTGWLKI

SEQ ID NO: 47796 - protein, 8 aa, synthetic construct
AAPGLFKI

SEQ ID NO: 47797 - protein, 8 aa, synthetic construct
AAPGWLKI

SEQ ID NO: 47798 - protein, 11 aa, synthetic construct
AAPHTTGWFKI

SEQ ID NO: 47799 - protein, 11 aa, synthetic construct
AAPNNTGWFKI

SEQ ID NO: 47800 - protein, 7 aa, synthetic construct
AAPNTTG

SEQ ID NO: 47801 - protein, 11 aa, synthetic construct
AAPNTTGWFEI

SEQ ID NO: 47802 - protein, 10 aa, synthetic construct
AARDGGWFKI

SEQ ID NO: 47803 - protein, 14 aa, synthetic construct
AARDLGNTTGWFKI

SEQ ID NO: 47804 - protein, 12 aa, synthetic construct
AARLYTTGWFKT

SEQ ID NO: 47805 - protein, 11 aa, synthetic construct
AARDYTGWFKI

SEQ ID NO: 47806 - protein, 11 aa, synthetic construct
AAREATGWFKI

SEQ ID NO: 47807 - protein, 12 aa, synthetic construct
AAREFATGWFKI

SEQ ID NO: 47808 - protein, 13 aa, synthetic construct
AAREKEVTRWFKI

SEQ ID NO: 47809 - protein, 11 aa, synthetic construct
AARETTGWFKI

SEQ ID NO: 47810 - protein, 12 aa, synthetic construct
AAREYTTGWLKI

SEQ ID NO: 47811 - protein, 11 aa, synthetic construct
AARGAAGWFKI

SEQ ID NO: 47812 - protein, 11 aa, synthetic construct
AARGASGWFKI

SEQ ID NO: 47813 - protein, 11 aa, synthetic construct
AARGATGWFEI

SEQ ID NO: 47814 - protein, 11 aa, synthetic construct
AARGATGWFRI

SEQ ID NO: 47815 - protein, 11 aa, synthetic construct
AARGATGWLKI

SEQ ID NO: 47816 - protein, 11 aa, synthetic construct
AARGHPGWFKI

SEQ ID NO: 47817 - protein, 12 aa, synthetic construct
AARGLATVWFKI

SEQ ID NO: 47818 - protein, 15 aa, synthetic construct
AARGPSLYTTGWFKI

SEQ ID NO: 47819 - protein, 9 aa, synthetic construct
AARGRYKKL

SEQ ID NO: 47820 - protein, 8 aa, synthetic construct
AARGYKKH

SEQ ID NO: 47821 - protein, 8 aa, synthetic construct
AARGYKKL

SEQ ID NO: 47822 - protein, 12 aa, synthetic construct
AARLFTTGWFKI

SEQ ID NO: 47823 - protein, 12 aa, synthetic construct
AARLYNTGWFKI

SEQ ID NO: 47824 - protein, 12 aa, synthetic construct
AARLYTTGWFEI

SEQ ID NO: 47825 - protein, 8 aa, synthetic construct
AARDYVKL

SEQ ID NO: 47826 - protein, 12 aa, synthetic construct
AARDYTAGWFKI

SEQ ID NO: 47827 - protein, 12 aa, synthetic construct
AARDNTTGWFKI

SEQ ID NO: 47828 - protein, 14 aa, synthetic construct
AARDYPFTTGWFKI

SEQ ID NO: 47829 - protein, 12 aa, synthetic construct
AARDPLNYYKKL

SEQ ID NO: 47830 - protein, 11 aa, synthetic construct
AARDPTDWFKI

SEQ ID NO: 47831 - protein, 13 aa, synthetic construct
AARDRRTTGWFKI

SEQ ID NO: 47832 - protein, 12 aa, synthetic construct
AARDRTTGWFKI

SEQ ID NO: 47833 - protein, 12 aa, synthetic construct
AARDRTTGWLKI

SEQ ID NO: 47834 - protein, 12 aa, synthetic construct
AARDSATGWFKI

SEQ ID NO: 47835 - protein, 9 aa, synthetic construct
AARDSGATG

SEQ ID NO: 47836 - protein, 12 aa, synthetic construct
AARDSGTGWFKI

SEQ ID NO: 47837 - protein, 13 aa, synthetic construct
AARDSHTTGWFKI

SEQ ID NO: 47838 - protein, 14 aa, synthetic construct
AARDSKYTTGWFKI

SEQ ID NO: 47839 - protein, 11 aa, synthetic construct
AARDSTGWFKI

SEQ ID NO: 47840 - protein, 9 aa, synthetic construct
AARDSYKKL

SEQ ID NO: 47841 - protein, 10 aa, synthetic construct
AARDSYYKKL

SEQ ID NO: 47842 - protein, 10 aa, synthetic construct
AARDTGWFKI

SEQ ID NO: 47843 - protein, 9 aa, synthetic construct
AARDVMEKL

SEQ ID NO: 47844 - protein, 10 aa, synthetic construct
AARDWDYKKL

SEQ ID NO: 47845 - protein, 11 aa, synthetic construct
AARDWTGWFKI

SEQ ID NO: 47846 - protein, 11 aa, synthetic construct
AARDYDYYKKL

SEQ ID NO: 47847 - protein, 11 aa, synthetic construct
AARDYEGWFKI

SEQ ID NO: 47848 - protein, 12 aa, synthetic construct
AAWAHSTGWLKI

SEQ ID NO: 47849 - protein, 12 aa, synthetic construct
AAWAHTNGWFKI

SEQ ID NO: 47850 - protein, 12 aa, synthetic construct
AAWAHTSGWFKI

SEQ ID NO: 47851 - protein, 12 aa, synthetic construct
AAWAYPTGRFKI

SEQ ID NO: 47852 - protein, 13 aa, synthetic construct
AAWAYRGPGWFKI

SEQ ID NO: 47853 - protein, 13 aa, synthetic construct
AAWAYRPTGGFKI

SEQ ID NO: 47854 - protein, 12 aa, synthetic construct
AAWAYRTGWFKI

SEQ ID NO: 47855 - protein, 12 aa, synthetic construct
AAWAYSAGWFKI

SEQ ID NO: 47856 - protein, 9 aa, synthetic construct
AAWAYSKKL

SEQ ID NO: 47857 - protein, 13 aa, synthetic construct
AAWAYSTTGWFKI

SEQ ID NO: 47858 - protein, 11 aa, synthetic construct
AAWAYTGLLKI

SEQ ID NO: 47859 - protein, 11 aa, synthetic construct
AAWAYTGWFKL

SEQ ID NO: 47860 - protein, 12 aa, synthetic construct
AAWAYTNGCFKI

SEQ ID NO: 47861 - protein, 12 aa, synthetic construct
AAWAYTNGWLQI

SEQ ID NO: 47862 - protein, 12 aa, synthetic construct
AAWAYTPGCLEI

SEQ ID NO: 47863 - protein, 12 aa, synthetic construct
AAWAYTPGWFKI

SEQ ID NO: 47864 - protein, 12 aa, synthetic construct
AAWAYTTCWFKI

SEQ ID NO: 47865 - protein, 12 aa, synthetic construct
AAWAYTTGGFKI

SEQ ID NO: 47866 - protein, 12 aa, synthetic construct
AAWAYTTGWFKK

SEQ ID NO: 47867 - protein, 12 aa, synthetic construct
AAWAYTTGWFKM

SEQ ID NO: 47868 - protein, 12 aa, synthetic construct
AAWAYTTGWFQI

SEQ ID NO: 47869 - protein, 12 aa, synthetic construct
AAWAYTTGWFTI

SEQ ID NO: 47870 - protein, 14 aa, synthetic construct
AAWAYTYTPGWFKI

SEQ ID NO: 47871 - protein, 12 aa, synthetic construct
AAWAYPTGWFQI

SEQ ID NO: 47872 - protein, 12 aa, synthetic construct
AAWAYPPGGFKI

SEQ ID NO: 47873 - protein, 14 aa, synthetic construct
AAWAYWLATGWFKI

SEQ ID NO: 47874 - protein, 11 aa, synthetic construct
AAWAYPGWFKI

SEQ ID NO: 47875 - protein, 8 aa, synthetic construct
AAWAWFKI

SEQ ID NO: 47876 - protein, 12 aa, synthetic construct
AAWAWTTGWFEI

SEQ ID NO: 47877 - protein, 10 aa, synthetic construct
AAWAWYYKKQ

SEQ ID NO: 47878 - protein, 11 aa, synthetic construct
AAWAYAGWFQI

SEQ ID NO: 47879 - protein, 12 aa, synthetic construct
AAWAYATGWFKI

SEQ ID NO: 47880 - protein, 12 aa, synthetic construct
AAWAYATGWLKI

SEQ ID NO: 47881 - protein, 13 aa, synthetic construct
AAWAYDATGWFKI

SEQ ID NO: 47882 - protein, 9 aa, synthetic construct
AAWAYDKKL

SEQ ID NO: 47883 - protein, 11 aa, synthetic construct
AAWAYDYYKKL

SEQ ID NO: 47884 - protein, 9 aa, synthetic construct
AAWAYFKKL

SEQ ID NO: 47885 - protein, 13 aa, synthetic construct
AAWAYGATGWFKI

SEQ ID NO: 47886 - protein, 12 aa, synthetic construct
AAWAYINGWLKI

SEQ ID NO: 47887 - protein, 12 aa, synthetic construct
AAWAYITGWFKI

SEQ ID NO: 47888 - protein, 8 aa, synthetic construct
AAWAYKKL

SEQ ID NO: 47889 - protein, 12 aa, synthetic construct
AAWAYNTGWSKI

SEQ ID NO: 47890 - protein, 13 aa, synthetic construct
AAWAYNTTGWFKI

SEQ ID NO: 47891 - protein, 14 aa, synthetic construct
AAWAYPFTTGWFKI

SEQ ID NO: 47892 - protein, 14 aa, synthetic construct
AAWAYPGTTGWFKI

SEQ ID NO: 47893 - protein, 14 aa, synthetic construct
AAWAYPGTTGWYKI

SEQ ID NO: 47894 - protein, 9 aa, synthetic construct
AAWAYWFKI

SEQ ID NO: 47895 - protein, 9 aa, synthetic construct
AAWAYWLKL

SEQ ID NO: 47896 - protein, 12 aa, synthetic construct
AAWAHTTGWFEI

SEQ ID NO: 47897 - protein, 11 aa, synthetic construct
AAWDCAGWFEV

SEQ ID NO: 47898 - protein, 11 aa, synthetic construct
AAWDCAGWFMI

SEQ ID NO: 47899 - protein, 11 aa, synthetic construct
AAWDCAGWFNI

SEQ ID NO: 47900 - protein, 11 aa, synthetic construct
AAWDCAGWLKI

SEQ ID NO: 47901 - protein, 12 aa, synthetic construct
AAWDCANGWLKK

SEQ ID NO: 47902 - protein, 12 aa, synthetic construct
AAWDCAPGWFKI

SEQ ID NO: 47903 - protein, 12 aa, synthetic construct
AAWDCATGWFKL

SEQ ID NO: 47904 - protein, 12 aa, synthetic construct
AAWDCATGWFKV

SEQ ID NO: 47905 - protein, 12 aa, synthetic construct
AAWDCATGWFQI

SEQ ID NO: 47906 - protein, 12 aa, synthetic construct
AAWDCGGGWFKI

SEQ ID NO: 47907 - protein, 13 aa, synthetic construct
AAWDCGTTGLFKI

SEQ ID NO: 47908 - protein, 12 aa, synthetic construct
AAWDCHTGWFKI

SEQ ID NO: 47909 - protein, 13 aa, synthetic construct
AAWDCHTTGWFKI

SEQ ID NO: 47910 - protein, 12 aa, synthetic construct
AAWDCITGWFKI

SEQ ID NO: 47911 - protein, 13 aa, synthetic construct
AAWDCKANTGPLY

SEQ ID NO: 47912 - protein, 12 aa, synthetic construct
AAWDCLGGWFKI

SEQ ID NO: 47913 - protein, 12 aa, synthetic construct
AAWDCNTGWLKI

SEQ ID NO: 47914 - protein, 12 aa, synthetic construct
AAWDCNTGWLTI

SEQ ID NO: 47915 - protein, 12 aa, synthetic construct
AAWDCPTCWFKI

SEQ ID NO: 47916 - protein, 12 aa, synthetic construct
AAWDCPTGCFNI

SEQ ID NO: 47917 - protein, 11 aa, synthetic construct
AAWDCAGWFKV

SEQ ID NO: 47918 - protein, 11 aa, synthetic construct
AAWDCAGWFEI

SEQ ID NO: 47919 - protein, 9 aa, synthetic construct
AAWAYYKKI

SEQ ID NO: 47920 - protein, 11 aa, synthetic construct
AAWDCAGWCKI

SEQ ID NO: 47921 - protein, 13 aa, synthetic construct
AAWCGRGTGWFEI

SEQ ID NO: 47922 - protein, 9 aa, synthetic construct
AAWCGWFKI

SEQ ID NO: 47923 - protein, 11 aa, synthetic construct
AAWCTTGWVTV

SEQ ID NO: 47924 - protein, 11 aa, synthetic construct
AAWDAAGWFKI

SEQ ID NO: 47925 - protein, 11 aa, synthetic construct
AAWDAAGWFKM

SEQ ID NO: 47926 - protein, 14 aa, synthetic construct
AAWDAGATNGWLKI

SEQ ID NO: 47927 - protein, 10 aa, synthetic construct
AAWDAGWFKI

SEQ ID NO: 47928 - protein, 8 aa, synthetic construct
AAWDAKKL

SEQ ID NO: 47929 - protein, 11 aa, synthetic construct
AAWDANGFFKI

SEQ ID NO: 47930 - protein, 11 aa, synthetic construct
AAWDANGWLKI

SEQ ID NO: 47931 - protein, 12 aa, synthetic construct
AAWDANTGWFKI

SEQ ID NO: 47932 - protein, 11 aa, synthetic construct
AAWDAPGWFMI

SEQ ID NO: 47933 - protein, 11 aa, synthetic construct
AAWDATDWFKI

SEQ ID NO: 47934 - protein, 7 aa, synthetic construct
AAWDATG

SEQ ID NO: 47935 - protein, 11 aa, synthetic construct
AAWDATGGFKI

SEQ ID NO: 47936 - protein, 11 aa, synthetic construct
AAWDATGWFKM

SEQ ID NO: 47937 - protein, 11 aa, synthetic construct
AAWDATGWFKV

SEQ ID NO: 47938 - protein, 11 aa, synthetic construct
AAWDATGWRKI

SEQ ID NO: 47939 - protein, 11 aa, synthetic construct
AAWDATGWVKI

SEQ ID NO: 47940 - protein, 12 aa, synthetic construct
AAWAWATGWFKI

SEQ ID NO: 47941 - protein, 13 aa, synthetic construct
AAWAVYTTGWFKI

SEQ ID NO: 47942 - protein, 11 aa, synthetic construct
AAWAVNYYNKL

SEQ ID NO: 47943 - protein, 13 aa, synthetic construct
AAWALYTTGRFKI

SEQ ID NO: 47944 - protein, 13 aa, synthetic construct
AAWALYTTGWFKR

SEQ ID NO: 47945 - protein, 13 aa, synthetic construct
AAWALYTTGWLKI

SEQ ID NO: 47946 - protein, 13 aa, synthetic construct
AAWALYTTSWFKI

SEQ ID NO: 47947 - protein, 12 aa, synthetic construct
AAWALYTTVGSR

SEQ ID NO: 47948 - protein, 12 aa, synthetic construct
AAWANTPGGLNI

SEQ ID NO: 47949 - protein, 7 aa, synthetic construct
AAWANTT

SEQ ID NO: 47950 - protein, 12 aa, synthetic construct
AAWANTTSWFKI

SEQ ID NO: 47951 - protein, 9 aa, synthetic construct
AAWANYKKL

SEQ ID NO: 47952 - protein, 10 aa, synthetic construct
AAWANYYKKI

SEQ ID NO: 47953 - protein, 10 aa, synthetic construct
AAWANYYKKL

SEQ ID NO: 47954 - protein, 15 aa, synthetic construct
AAWAPEGYTTGWFKI

SEQ ID NO: 47955 - protein, 14 aa, synthetic construct
AAWAPLYTTGWFKI

SEQ ID NO: 47956 - protein, 12 aa, synthetic construct
AAWAPPTGWVKI

SEQ ID NO: 47957 - protein, 15 aa, synthetic construct
AAWAPSHYTTGWFKI

SEQ ID NO: 47958 - protein, 15 aa, synthetic construct
AAWAPSLYTTGWSKI

SEQ ID NO: 47959 - protein, 11 aa, synthetic construct
AAWAPTGWVVV

SEQ ID NO: 47960 - protein, 12 aa, synthetic construct
AAWAPTTGRFKI

SEQ ID NO: 47961 - protein, 12 aa, synthetic construct
AAWAPTTGWFKK

SEQ ID NO: 47962 - protein, 12 aa, synthetic construct
AAWAPTTGWFKM

SEQ ID NO: 47963 - protein, 13 aa, synthetic construct
AAWALYTTGWFEI

SEQ ID NO: 47964 - protein, 13 aa, synthetic construct
AAWALYNTGWFKI

SEQ ID NO: 47965 - protein, 11 aa, synthetic construct
AAWAVNYYKKH

SEQ ID NO: 47966 - protein, 12 aa, synthetic construct
AAWALTTGWLKI

SEQ ID NO: 47967 - protein, 12 aa, synthetic construct
AAWAHTTGWFKR

SEQ ID NO: 47968 - protein, 12 aa, synthetic construct
AAWAHTTGWFKV

SEQ ID NO: 47969 - protein, 12 aa, synthetic construct
AAWAHTTGWFRI

SEQ ID NO: 47970 - protein, 10 aa, synthetic construct
AAWAHYYKKI

SEQ ID NO: 47971 - protein, 10 aa, synthetic construct
AAWAHYYRKL

SEQ ID NO: 47972 - protein, 12 aa, synthetic construct
AAWAKTTGWFKI

SEQ ID NO: 47973 - protein, 12 aa, synthetic construct
AAWALATGWFKI

SEQ ID NO: 47974 - protein, 14 aa, synthetic construct
AAWALEDTTGWFKI

SEQ ID NO: 47975 - protein, 14 aa, synthetic construct
AAWALGIATGWFKI

SEQ ID NO: 47976 - protein, 12 aa, synthetic construct
AAWALGPGWFRI

SEQ ID NO: 47977 - protein, 10 aa, synthetic construct
AAWALGYKKL

SEQ ID NO: 47978 - protein, 12 aa, synthetic construct
AAWALNTGWFKI

SEQ ID NO: 47979 - protein, 14 aa, synthetic construct
AAWALPHTPGWFKI

SEQ ID NO: 47980 - protein, 14 aa, synthetic construct
AAWALPHTTGWLKR

SEQ ID NO: 47981 - protein, 12 aa, synthetic construct
AAWALPTGWFKI

SEQ ID NO: 47982 - protein, 12 aa, synthetic construct
AAWALPTGWLKI

SEQ ID NO: 47983 - protein, 12 aa, synthetic construct
AAWALTNGWFNI

SEQ ID NO: 47984 - protein, 12 aa, synthetic construct
AAWALTPGWFKI

SEQ ID NO: 47985 - protein, 12 aa, synthetic construct
AAWALTTGLFKI

SEQ ID NO: 47986 - protein, 12 aa, synthetic construct
AAWAPTTGWFNI

SEQ ID NO: 47987 - protein, 12 aa, synthetic construct
AAWAPTTGWLKI

SEQ ID NO: 47988 - protein, 12 aa, synthetic construct
AAWAPTTGWSKI

SEQ ID NO: 47989 - protein, 12 aa, synthetic construct
AAWAPTTGWVKI

SEQ ID NO: 47990 - protein, 11 aa, synthetic construct
AAWASGGGFKI

SEQ ID NO: 47991 - protein, 10 aa, synthetic construct
AAWASGLFKI

SEQ ID NO: 47992 - protein, 12 aa, synthetic construct
AAWASGTGWFMI

SEQ ID NO: 47993 - protein, 10 aa, synthetic construct
AAWASGWFKI

SEQ ID NO: 47994 - protein, 11 aa, synthetic construct
AAWASLGWFKI

SEQ ID NO: 47995 - protein, 11 aa, synthetic construct
AAWASNYYKKL

SEQ ID NO: 47996 - protein, 13 aa, synthetic construct
AAWASPAPGWFKI

SEQ ID NO: 47997 - protein, 13 aa, synthetic construct
AAWASPATGWFKI

SEQ ID NO: 47998 - protein, 12 aa, synthetic construct
AAWASPTGWFKI

SEQ ID NO: 47999 - protein, 11 aa, synthetic construct
AAWASTGWFKI

SEQ ID NO: 48000 - protein, 12 aa, synthetic construct
AAWASTTGWFKI

SEQ ID NO: 48001 - protein, 9 aa, synthetic construct
AAWASWFKI

SEQ ID NO: 48002 - protein, 10 aa, synthetic construct
AAWASYYKKH

SEQ ID NO: 48003 - protein, 10 aa, synthetic construct
AAWASYYKKL

SEQ ID NO: 48004 - protein, 10 aa, synthetic construct
AAWATGWFEI

SEQ ID NO: 48005 - protein, 11 aa, synthetic construct
AAWATPGLFKI

SEQ ID NO: 48006 - protein, 11 aa, synthetic construct
AAWATTGWFEI

SEQ ID NO: 48007 - protein, 11 aa, synthetic construct
AAWATTGWFMI

SEQ ID NO: 48008 - protein, 11 aa, synthetic construct
AAWATTGWLKI

SEQ ID NO: 48009 - protein, 13 aa, synthetic construct
AAWASGATGWFKI

SEQ ID NO: 48010 - protein, 13 aa, synthetic construct
AAWASEATGWVKI

SEQ ID NO: 48011 - protein, 13 aa, synthetic construct
AAWASEATGWFKI

SEQ ID NO: 48012 - protein, 12 aa, synthetic construct
AAWARHTGWLKI

SEQ ID NO: 48013 - protein, 13 aa, synthetic construct
AAWAQDTTCGFKI

SEQ ID NO: 48014 - protein, 12 aa, synthetic construct
AAWAQNTGCFKI

SEQ ID NO: 48015 - protein, 10 aa, synthetic construct
AAWAQYYKKL

SEQ ID NO: 48016 - protein, 12 aa, synthetic construct
AAWARATGWFKI

SEQ ID NO: 48017 - protein, 12 aa, synthetic construct
AAWARDTGWFKI

SEQ ID NO: 48018 - protein, 12 aa, synthetic construct
AAWARGSGWLKI

SEQ ID NO: 48019 - protein, 12 aa, synthetic construct
AAWARGTGWFKI

SEQ ID NO: 48020 - protein, 8 aa, synthetic construct
AAWARGTI

SEQ ID NO: 48021 - protein, 12 aa, synthetic construct
AAWARSTGWFEI

SEQ ID NO: 48022 - protein, 13 aa, synthetic construct
AAWASEAPGWFVI

SEQ ID NO: 48023 - protein, 12 aa, synthetic construct
AAWARTTGLFKI

SEQ ID NO: 48024 - protein, 12 aa, synthetic construct
AAWARTTGWFKL

SEQ ID NO: 48025 - protein, 12 aa, synthetic construct
AAWARTTGWFKV

SEQ ID NO: 48026 - protein, 12 aa, synthetic construct
AAWARTTGWFMI

SEQ ID NO: 48027 - protein, 12 aa, synthetic construct
AAWARTTGWFQI

SEQ ID NO: 48028 - protein, 12 aa, synthetic construct
AAWARTTGWSKI

SEQ ID NO: 48029 - protein, 9 aa, synthetic construct
AAWARWFKI

SEQ ID NO: 48030 - protein, 12 aa, synthetic construct
AAWASATGWFKI

SEQ ID NO: 48031 - protein, 11 aa, synthetic construct
AALNTTGWVKI

SEQ ID NO: 48032 - protein, 11 aa, synthetic construct
AALNNTGWFKI

SEQ ID NO: 48033 - protein, 11 aa, synthetic construct
AALHTTGWFKI

SEQ ID NO: 48034 - protein, 13 aa, synthetic construct
AAGDDDTTGWFKI

SEQ ID NO: 48035 - protein, 12 aa, synthetic construct
AAGDDTTGWVKI

SEQ ID NO: 48036 - protein, 13 aa, synthetic construct
AAGDEETPGWFKI

SEQ ID NO: 48037 - protein, 13 aa, synthetic construct
AAGDFGTTGWFKI

SEQ ID NO: 48038 - protein, 11 aa, synthetic construct
AAGDFPGGVKV

SEQ ID NO: 48039 - protein, 11 aa, synthetic construct
AAGDFPGWFKI

SEQ ID NO: 48040 - protein, 13 aa, synthetic construct
AAGDFRTTGWFKI

SEQ ID NO: 48041 - protein, 11 aa, synthetic construct
AAGDFTGWCKI

SEQ ID NO: 48042 - protein, 12 aa, synthetic construct
AAGDFTPGWFKI

SEQ ID NO: 48043 - protein, 12 aa, synthetic construct
AAGDFTTGGFTI

SEQ ID NO: 48044 - protein, 9 aa, synthetic construct
AAGDFYKKL

SEQ ID NO: 48045 - protein, 12 aa, synthetic construct
AAGDGATGGFKI

SEQ ID NO: 48046 - protein, 10 aa, synthetic construct
AAGDGGWLKI

SEQ ID NO: 48047 - protein, 9 aa, synthetic construct
AAGDGWFKI

SEQ ID NO: 48048 - protein, 12 aa, synthetic construct
AAGDHTTGWFKL

SEQ ID NO: 48049 - protein, 12 aa, synthetic construct
AAGDHTTGWLKI

SEQ ID NO: 48050 - protein, 14 aa, synthetic construct
AAGDKDGTPGWFKI

SEQ ID NO: 48051 - protein, 13 aa, synthetic construct
AAGDKGTTGWFKI

SEQ ID NO: 48052 - protein, 7 aa, synthetic construct
AAGDKKL

SEQ ID NO: 48053 - protein, 12 aa, synthetic construct
AAGDLGTGGFEI

SEQ ID NO: 48054 - protein, 9 aa, synthetic construct
AAGDDTTGW

SEQ ID NO: 48055 - protein, 9 aa, synthetic construct
AAGDCWLKI

SEQ ID NO: 48056 - protein, 12 aa, synthetic construct
AAGDMATGWFKI

SEQ ID NO: 48057 - protein, 9 aa, synthetic construct
AAGDCWFKI

SEQ ID NO: 48058 - protein, 12 aa, synthetic construct
AAGAWTTGWFKI

SEQ ID NO: 48059 - protein, 14 aa, synthetic construct
AAGAYEETPGWLKI

SEQ ID NO: 48060 - protein, 11 aa, synthetic construct
AAGAYEGWFKI

SEQ ID NO: 48061 - protein, 10 aa, synthetic construct
AAGAYGWVKI

SEQ ID NO: 48062 - protein, 13 aa, synthetic construct
AAGAYRTTGWFNI

SEQ ID NO: 48063 - protein, 9 aa, synthetic construct
AAGAYSKKL

SEQ ID NO: 48064 - protein, 12 aa, synthetic construct
AAGAYTTGWVKI

SEQ ID NO: 48065 - protein, 14 aa, synthetic construct
AAGAYWLATGWFKI

SEQ ID NO: 48066 - protein, 9 aa, synthetic construct
AAGAYYKKL

SEQ ID NO: 48067 - protein, 6 aa, synthetic construct
AAGCKI

SEQ ID NO: 48068 - protein, 11 aa, synthetic construct
AAGCTTSWLKI

SEQ ID NO: 48069 - protein, 11 aa, synthetic construct
AAGDATGWLKI

SEQ ID NO: 48070 - protein, 11 aa, synthetic construct
AAGDATGWVKI

SEQ ID NO: 48071 - protein, 11 aa, synthetic construct
AAGDCAGWVKR

SEQ ID NO: 48072 - protein, 12 aa, synthetic construct
AAGDCATGWFKI

SEQ ID NO: 48073 - protein, 10 aa, synthetic construct
AAGDCGRFKI

SEQ ID NO: 48074 - protein, 11 aa, synthetic construct
AAGDCTGWFKI

SEQ ID NO: 48075 - protein, 12 aa, synthetic construct
AAGDCTSGWVKL

SEQ ID NO: 48076 - protein, 13 aa, synthetic construct
AAGDCVLTGWFKI

SEQ ID NO: 48077 - protein, 13 aa, synthetic construct
AAGDLYTTGWFKI

SEQ ID NO: 48078 - protein, 11 aa, synthetic construct
AAGDNTGWFKI

SEQ ID NO: 48079 - protein, 13 aa, synthetic construct
AAGDWNTTGWSKI

SEQ ID NO: 48080 - protein, 9 aa, synthetic construct
AAGDSWFKI

SEQ ID NO: 48081 - protein, 14 aa, synthetic construct
AAGDTDGTTGWFKI

SEQ ID NO: 48082 - protein, 10 aa, synthetic construct
AAGDTGWFKI

SEQ ID NO: 48083 - protein, 10 aa, synthetic construct
AAGDTGWFQI

SEQ ID NO: 48084 - protein, 11 aa, synthetic construct
AAGDTPGWCKK

SEQ ID NO: 48085 - protein, 11 aa, synthetic construct
AAGDTPGWVKI

SEQ ID NO: 48086 - protein, 11 aa, synthetic construct
AAGDTTCWFKI

SEQ ID NO: 48087 - protein, 11 aa, synthetic construct
AAGDTTCWLKI

SEQ ID NO: 48088 - protein, 11 aa, synthetic construct
AAGDTTGGFRI

SEQ ID NO: 48089 - protein, 11 aa, synthetic construct
AAGDTTGWCTI

SEQ ID NO: 48090 - protein, 11 aa, synthetic construct
AAGDTTGWFNI

SEQ ID NO: 48091 - protein, 11 aa, synthetic construct
AAGDTTGWIKI

SEQ ID NO: 48092 - protein, 11 aa, synthetic construct
AAGDTTGWVTI

SEQ ID NO: 48093 - protein, 11 aa, synthetic construct
AAGDTTRWIKI

SEQ ID NO: 48094 - protein, 12 aa, synthetic construct
AAGDTTTGWYNI

SEQ ID NO: 48095 - protein, 9 aa, synthetic construct
AAGDVMEKL

SEQ ID NO: 48096 - protein, 12 aa, synthetic construct
AAGDVTTGWFKI

SEQ ID NO: 48097 - protein, 12 aa, synthetic construct
AAGDWATGWVKI

SEQ ID NO: 48098 - protein, 8 aa, synthetic construct
AAGDWFKI

SEQ ID NO: 48099 - protein, 14 aa, synthetic construct
AAGDWGIYTGWFKI

SEQ ID NO: 48100 - protein, 13 aa, synthetic construct
AAGDSYTTGWVKI

SEQ ID NO: 48101 - protein, 12 aa, synthetic construct
AAGDSTTGWFKI

SEQ ID NO: 48102 - protein, 11 aa, synthetic construct
AAGDNTGWFTI

SEQ ID NO: 48103 - protein, 11 aa, synthetic construct
AAGDSTGWVKI

SEQ ID NO: 48104 - protein, 11 aa, synthetic construct
AAGDNTGWVKI

SEQ ID NO: 48105 - protein, 12 aa, synthetic construct
AAGDNTTGLLKI

SEQ ID NO: 48106 - protein, 5 aa, synthetic construct
AAGDP

SEQ ID NO: 48107 - protein, 12 aa, synthetic construct
AAGDPTTGWFKI

SEQ ID NO: 48108 - protein, 13 aa, synthetic construct
AAGDPYNTGWFKI

SEQ ID NO: 48109 - protein, 13 aa, synthetic construct
AAGDPYTTGLFKI

SEQ ID NO: 48110 - protein, 11 aa, synthetic construct
AAGDQPGWVKI

SEQ ID NO: 48111 - protein, 12 aa, synthetic construct
AAGDRGSGWFKI

SEQ ID NO: 48112 - protein, 12 aa, synthetic construct
AAGDRGTGWFKI

SEQ ID NO: 48113 - protein, 13 aa, synthetic construct
AAGDRRTTGWFKL

SEQ ID NO: 48114 - protein, 12 aa, synthetic construct
AAGDRTTGWFKI

SEQ ID NO: 48115 - protein, 13 aa, synthetic construct
AAGDSEATGWFKI

SEQ ID NO: 48116 - protein, 13 aa, synthetic construct
AAGDSGATGWFKI

SEQ ID NO: 48117 - protein, 11 aa, synthetic construct
AAGDSGGWFKI

SEQ ID NO: 48118 - protein, 14 aa, synthetic construct
AAGDSGTTTGWFKI

SEQ ID NO: 48119 - protein, 13 aa, synthetic construct
AAGDSHTTGWFKI

SEQ ID NO: 48120 - protein, 13 aa, synthetic construct
AAGDSKTTGWVKI

SEQ ID NO: 48121 - protein, 13 aa, synthetic construct
AAGDSNTTGWFKI

SEQ ID NO: 48122 - protein, 11 aa, synthetic construct
AAGDSPGWVKI

SEQ ID NO: 48123 - protein, 12 aa, synthetic construct
AAGAWGTGWVKI

SEQ ID NO: 48124 - protein, 12 aa, synthetic construct
AAGAWATGWFQI

SEQ ID NO: 48125 - protein, 12 aa, synthetic construct
AAGATTTGWFKI

SEQ ID NO: 48126 - protein, 11 aa, synthetic construct
AACDYTGWFKI

SEQ ID NO: 48127 - protein, 12 aa, synthetic construct
AACEYTTGCFKI

SEQ ID NO: 48128 - protein, 12 aa, synthetic construct
AACEYTTGWFKI

SEQ ID NO: 48129 - protein, 12 aa, synthetic construct
AACGDTTAWFKR

SEQ ID NO: 48130 - protein, 12 aa, synthetic construct
AACGLATGWFKI

SEQ ID NO: 48131 - protein, 13 aa, synthetic construct
AACGNNTTGWFKI

SEQ ID NO: 48132 - protein, 8 aa, synthetic construct
AACGRFKI

SEQ ID NO: 48133 - protein, 10 aa, synthetic construct
AACGTGLFKI

SEQ ID NO: 48134 - protein, 10 aa, synthetic construct
AACGTGWLKI

SEQ ID NO: 48135 - protein, 8 aa, synthetic construct
AACGWLKI

SEQ ID NO: 48136 - protein, 8 aa, synthetic construct
AACGWSKI

SEQ ID NO: 48137 - protein, 8 aa, synthetic construct
AACGWVKI

SEQ ID NO: 48138 - protein, 12 aa, synthetic construct
AACGYTKGCFKI

SEQ ID NO: 48139 - protein, 12 aa, synthetic construct
AACGYTTGWFKI

SEQ ID NO: 48140 - protein, 9 aa, synthetic construct
AACGYYKKL

SEQ ID NO: 48141 - protein, 7 aa, synthetic construct
AACPFKL

SEQ ID NO: 48142 - protein, 7 aa, synthetic construct
AACPFQI

SEQ ID NO: 48143 - protein, 9 aa, synthetic construct
AACPGWFKI

SEQ ID NO: 48144 - protein, 7 aa, synthetic construct
AACPIKI

SEQ ID NO: 48145 - protein, 7 aa, synthetic construct
AACPLKI

SEQ ID NO: 48146 - protein, 12 aa, synthetic construct
AACDYTPGWFKI

SEQ ID NO: 48147 - protein, 12 aa, synthetic construct
AACDYSTGWFKI

SEQ ID NO: 48148 - protein, 11 aa, synthetic construct
AAGATTGWFKI

SEQ ID NO: 48149 - protein, 13 aa, synthetic construct
AACDYRATGWFKI

SEQ ID NO: 48150 - protein, 12 aa, synthetic construct
AACADNTGWFKI

SEQ ID NO: 48151 - protein, 12 aa, synthetic construct
AACAPTTGWFKI

SEQ ID NO: 48152 - protein, 12 aa, synthetic construct
AACASTNVRYKK

SEQ ID NO: 48153 - protein, 12 aa, synthetic construct
AACDCATGWFKI

SEQ ID NO: 48154 - protein, 12 aa, synthetic construct
AACDCTTGWFKI

SEQ ID NO: 48155 - protein, 9 aa, synthetic construct
AACDCWFKI

SEQ ID NO: 48156 - protein, 12 aa, synthetic construct
AACDDTTGWFKI

SEQ ID NO: 48157 - protein, 12 aa, synthetic construct
AACDFTTGWFKI

SEQ ID NO: 48158 - protein, 12 aa, synthetic construct
AACDHTTGWFKI

SEQ ID NO: 48159 - protein, 12 aa, synthetic construct
AACDRGSGWFKI

SEQ ID NO: 48160 - protein, 12 aa, synthetic construct
AACDRTTGWFKI

SEQ ID NO: 48161 - protein, 14 aa, synthetic construct
AACDSGCTTGWFKI

SEQ ID NO: 48162 - protein, 13 aa, synthetic construct
AACDSHTTGWFKI

SEQ ID NO: 48163 - protein, 14 aa, synthetic construct
AACDSKYTTGWFKI

SEQ ID NO: 48164 - protein, 11 aa, synthetic construct
AACDSPCGFKI

SEQ ID NO: 48165 - protein, 13 aa, synthetic construct
AACDWNTTGWFKI

SEQ ID NO: 48166 - protein, 11 aa, synthetic construct
AACDYAGWFKI

SEQ ID NO: 48167 - protein, 12 aa, synthetic construct
AACDYATGWFKI

SEQ ID NO: 48168 - protein, 12 aa, synthetic construct
AACDYGTGWFKI

SEQ ID NO: 48169 - protein, 9 aa, synthetic construct
AACTDWFKI

SEQ ID NO: 48170 - protein, 9 aa, synthetic construct
AACTGWFEI

SEQ ID NO: 48171 - protein, 9 aa, synthetic construct
AACTGWFKL

SEQ ID NO: 48172 - protein, 9 aa, synthetic construct
AACTGWFKR

SEQ ID NO: 48173 - protein, 8 aa, synthetic construct
AAFGWFKR

SEQ ID NO: 48174 - protein, 8 aa, synthetic construct
AAFGWFMM

SEQ ID NO: 48175 - protein, 8 aa, synthetic construct
AAFGWFRI

SEQ ID NO: 48176 - protein, 10 aa, synthetic construct
AAFTTDWFKI

SEQ ID NO: 48177 - protein, 10 aa, synthetic construct
AAFTTGWFNI

SEQ ID NO: 48178 - protein, 10 aa, synthetic construct
AAFTTGWLKI

SEQ ID NO: 48179 - protein, 12 aa, synthetic construct
AAGACRGGWFKT

SEQ ID NO: 48180 - protein, 12 aa, synthetic construct
AAGADTTGWFKI

SEQ ID NO: 48181 - protein, 9 aa, synthetic construct
AAGAEYKKH

SEQ ID NO: 48182 - protein, 12 aa, synthetic construct
AAGAFATGWFKI

SEQ ID NO: 48183 - protein, 13 aa, synthetic construct
AAGALYTTGWFKI

SEQ ID NO: 48184 - protein, 11 aa, synthetic construct
AAGANTGWFKI

SEQ ID NO: 48185 - protein, 10 aa, synthetic construct
AAGAPAWFKI

SEQ ID NO: 48186 - protein, 13 aa, synthetic construct
AAGAPYTTGWFKI

SEQ ID NO: 48187 - protein, 12 aa, synthetic construct
AAGARATGWFKI

SEQ ID NO: 48188 - protein, 9 aa, synthetic construct
AAGASGFKI

SEQ ID NO: 48189 - protein, 12 aa, synthetic construct
AAGASGPGWFKI

SEQ ID NO: 48190 - protein, 11 aa, synthetic construct
AAGASNYDKTL

SEQ ID NO: 48191 - protein, 13 aa, synthetic construct
AAGASYTTGWFKI

SEQ ID NO: 48192 - protein, 11 aa, synthetic construct
AAEYTTGWVKI

SEQ ID NO: 48193 - protein, 11 aa, synthetic construct
AAEYTTGWFRI

SEQ ID NO: 48194 - protein, 11 aa, synthetic construct
AAEYTTGLFKI

SEQ ID NO: 48195 - protein, 10 aa, synthetic construct
AADTNGWFKI

SEQ ID NO: 48196 - protein, 9 aa, synthetic construct
AACTGWSKI

SEQ ID NO: 48197 - protein, 9 aa, synthetic construct
AACTGWYNI

SEQ ID NO: 48198 - protein, 7 aa, synthetic construct
AACWVKI

SEQ ID NO: 48199 - protein, 11 aa, synthetic construct
AACYTTGWFKI

SEQ ID NO: 48200 - protein, 10 aa, synthetic construct
AADSTGWFKI

SEQ ID NO: 48201 - protein, 10 aa, synthetic construct
AADTHRWFTV

SEQ ID NO: 48202 - protein, 10 aa, synthetic construct
AADTKGWLKI

SEQ ID NO: 48203 - protein, 10 aa, synthetic construct
AADTNGLLKI

SEQ ID NO: 48204 - protein, 10 aa, synthetic construct
AADTTGWFKV

SEQ ID NO: 48205 - protein, 11 aa, synthetic construct
AAEYTNGWFKI

SEQ ID NO: 48206 - protein, 10 aa, synthetic construct
AADTTGWFNI

SEQ ID NO: 48207 - protein, 10 aa, synthetic construct
AADTTGWFRI

SEQ ID NO: 48208 - protein, 10 aa, synthetic construct
AADTTGWLNI

SEQ ID NO: 48209 - protein, 10 aa, synthetic construct
AADTTGWVKI

SEQ ID NO: 48210 - protein, 11 aa, synthetic construct
AAEDNTRWLKI

SEQ ID NO: 48211 - protein, 11 aa, synthetic construct
AAEDTTGWFQI

SEQ ID NO: 48212 - protein, 11 aa, synthetic construct
AAEFTTGWLKI

SEQ ID NO: 48213 - protein, 10 aa, synthetic construct
AAETPGWFKI

SEQ ID NO: 48214 - protein, 10 aa, synthetic construct
AAGDWGWFRI

SEQ ID NO: 48215 - protein, 12 aa, synthetic construct
AAGDWTTGGLKI

SEQ ID NO: 48216 - protein, 12 aa, synthetic construct
AALGYTHGWLKI

SEQ ID NO: 48217 - protein, 12 aa, synthetic construct
AALAQTKGWLKI

SEQ ID NO: 48218 - protein, 12 aa, synthetic construct
AALAYTNGWLKI

SEQ ID NO: 48219 - protein, 11 aa, synthetic construct
AALDATGWFKI

SEQ ID NO: 48220 - protein, 12 aa, synthetic construct
AALDCATGWFKI

SEQ ID NO: 48221 - protein, 13 aa, synthetic construct
AALDCGTTGWFKI

SEQ ID NO: 48222 - protein, 11 aa, synthetic construct
AALDCTGWFKI

SEQ ID NO: 48223 - protein, 13 aa, synthetic construct
AALDDDTTGWFKI

SEQ ID NO: 48224 - protein, 11 aa, synthetic construct
AALDDSGWFKI

SEQ ID NO: 48225 - protein, 11 aa, synthetic construct
AALDFTGWFKI

SEQ ID NO: 48226 - protein, 8 aa, synthetic construct
AALDFVKL

SEQ ID NO: 48227 - protein, 10 aa, synthetic construct
AALDGGWFKK

SEQ ID NO: 48228 - protein, 12 aa, synthetic construct
AALDHTTGWFKI

SEQ ID NO: 48229 - protein, 13 aa, synthetic construct
AALDKGTTGWFKI

SEQ ID NO: 48230 - protein, 7 aa, synthetic construct
AALDKKL

SEQ ID NO: 48231 - protein, 12 aa, synthetic construct
AALDLGNGWFKI

SEQ ID NO: 48232 - protein, 12 aa, synthetic construct
AALDLGPGWFKI

SEQ ID NO: 48233 - protein, 12 aa, synthetic construct
AALDLTTGWLKI

SEQ ID NO: 48234 - protein, 9 aa, synthetic construct
AALDLYKKL

SEQ ID NO: 48235 - protein, 14 aa, synthetic construct
AALDNPHTTCLFKI

SEQ ID NO: 48236 - protein, 12 aa, synthetic construct
AALDNTTGWFKI

SEQ ID NO: 48237 - protein, 11 aa, synthetic construct
AALATAGWCEI

SEQ ID NO: 48238 - protein, 12 aa, synthetic construct
AALAPTTGWFKI

SEQ ID NO: 48239 - protein, 11 aa, synthetic construct
AALDPTGWFKI

SEQ ID NO: 48240 - protein, 12 aa, synthetic construct
AALANTTGWFKI

SEQ ID NO: 48241 - protein, 13 aa, synthetic construct
AAGVYGSTGWFKI

SEQ ID NO: 48242 - protein, 12 aa, synthetic construct
AAGVYTTGWFKI

SEQ ID NO: 48243 - protein, 7 aa, synthetic construct
AAGWFKL

SEQ ID NO: 48244 - protein, 7 aa, synthetic construct
AAGWFNI

SEQ ID NO: 48245 - protein, 7 aa, synthetic construct
AAGWFQI

SEQ ID NO: 48246 - protein, 5 aa, synthetic construct
AAGWI

SEQ ID NO: 48247 - protein, 11 aa, synthetic construct
AAGYNTCWFKI

SEQ ID NO: 48248 - protein, 11 aa, synthetic construct
AAGYNTGWFKI

SEQ ID NO: 48249 - protein, 11 aa, synthetic construct
AAGYNTGWFKL

SEQ ID NO: 48250 - protein, 16 aa, synthetic construct
AAGYPRFGEVNLIKGK

SEQ ID NO: 48251 - protein, 10 aa, synthetic construct
AAGYTGWFKI

SEQ ID NO: 48252 - protein, 11 aa, synthetic construct
AAGYTPGWFKI

SEQ ID NO: 48253 - protein, 11 aa, synthetic construct
AAGYTPGWFQI

SEQ ID NO: 48254 - protein, 11 aa, synthetic construct
AAGYTTCWFKI

SEQ ID NO: 48255 - protein, 11 aa, synthetic construct
AAGYTTGWFKV

SEQ ID NO: 48256 - protein, 11 aa, synthetic construct
AAGYTTGWVKI

SEQ ID NO: 48257 - protein, 11 aa, synthetic construct
AAGYTTGWVNI

SEQ ID NO: 48258 - protein, 10 aa, synthetic construct
AAKTTGWFKI

SEQ ID NO: 48259 - protein, 12 aa, synthetic construct
AALAHTTGCFKI

SEQ ID NO: 48260 - protein, 10 aa, synthetic construct
AALDPSWFKI

SEQ ID NO: 48261 - protein, 13 aa, synthetic construct
AALDPYTTGWFKI

SEQ ID NO: 48262 - protein, 10 aa, synthetic construct
AAGDYDYKKL

SEQ ID NO: 48263 - protein, 15 aa, synthetic construct
AALERKGYTTGWFKI

SEQ ID NO: 48264 - protein, 12 aa, synthetic construct
AALEYSTGWFKI

SEQ ID NO: 48265 - protein, 12 aa, synthetic construct
AALEYTTGCFKI

SEQ ID NO: 48266 - protein, 12 aa, synthetic construct
AALEYTTGRFNI

SEQ ID NO: 48267 - protein, 12 aa, synthetic construct
AALEYTTGWFKI

SEQ ID NO: 48268 - protein, 12 aa, synthetic construct
AALGDTNGLFKI

SEQ ID NO: 48269 - protein, 12 aa, synthetic construct
AALGDTTGWFKR

SEQ ID NO: 48270 - protein, 12 aa, synthetic construct
AALGDTTGWLEI

SEQ ID NO: 48271 - protein, 14 aa, synthetic construct
AALGERDTTGWLKI

SEQ ID NO: 48272 - protein, 13 aa, synthetic construct
AALGGDTPGWFKI

SEQ ID NO: 48273 - protein, 9 aa, synthetic construct
AALGGWFKI

SEQ ID NO: 48274 - protein, 12 aa, synthetic construct
AALGGYPGWFKI

SEQ ID NO: 48275 - protein, 11 aa, synthetic construct
AALGNTGWFKI

SEQ ID NO: 48276 - protein, 10 aa, synthetic construct
AALGPGWFKI

SEQ ID NO: 48277 - protein, 13 aa, synthetic construct
AALGTHTTGRFKI

SEQ ID NO: 48278 - protein, 10 aa, synthetic construct
AALGTRWFKI

SEQ ID NO: 48279 - protein, 12 aa, synthetic construct
AALGVSTGWLKI

SEQ ID NO: 48280 - protein, 12 aa, synthetic construct
AALGVTTGWFKI

SEQ ID NO: 48281 - protein, 8 aa, synthetic construct
AALGYKKL

SEQ ID NO: 48282 - protein, 14 aa, synthetic construct
AALGYPGTNGWFKI

SEQ ID NO: 48283 - protein, 12 aa, synthetic construct
AALEYNTGWFKI

SEQ ID NO: 48284 - protein, 10 aa, synthetic construct
AALENYYKKL

SEQ ID NO: 48285 - protein, 12 aa, synthetic construct
AALDRATGWFKI

SEQ ID NO: 48286 - protein, 9 aa, synthetic construct
AALENYKKL

SEQ ID NO: 48287 - protein, 12 aa, synthetic construct
AALDRGTGWFNI

SEQ ID NO: 48288 - protein, 13 aa, synthetic construct
AALDSDTTGWFKI

SEQ ID NO: 48289 - protein, 13 aa, synthetic construct
AALDSEATGWFKI

SEQ ID NO: 48290 - protein, 13 aa, synthetic construct
AALDSGATGWFKI

SEQ ID NO: 48291 - protein, 14 aa, synthetic construct
AALDSGYTTGWFKI

SEQ ID NO: 48292 - protein, 12 aa, synthetic construct
AALDSTTGWFKI

SEQ ID NO: 48293 - protein, 13 aa, synthetic construct
AALDSYNTGGVKI

SEQ ID NO: 48294 - protein, 10 aa, synthetic construct
AALDTGLFKI

SEQ ID NO: 48295 - protein, 11 aa, synthetic construct
AALDTTGWFKL

SEQ ID NO: 48296 - protein, 11 aa, synthetic construct
AALDTTGWFNI

SEQ ID NO: 48297 - protein, 9 aa, synthetic construct
AALDVIEKL

SEQ ID NO: 48298 - protein, 10 aa, synthetic construct
AALDWDYKKI

SEQ ID NO: 48299 - protein, 14 aa, synthetic construct
AALDYGPSTGWFKI

SEQ ID NO: 48300 - protein, 12 aa, synthetic construct
AALDYPTGWLKI

SEQ ID NO: 48301 - protein, 12 aa, synthetic construct
AALDYSTGWFKI

SEQ ID NO: 48302 - protein, 12 aa, synthetic construct
AALDYTKGWFKI

SEQ ID NO: 48303 - protein, 14 aa, synthetic construct
AALDYTYTTGWFKI

SEQ ID NO: 48304 - protein, 9 aa, synthetic construct
AALDYWFKI

SEQ ID NO: 48305 - protein, 9 aa, synthetic construct
AALDYYKKL

SEQ ID NO: 48306 - protein, 13 aa, synthetic construct
AAGVYGSTGLFKI

SEQ ID NO: 48307 - protein, 12 aa, synthetic construct
AAGVTTTGWFKI

SEQ ID NO: 48308 - protein, 10 aa, synthetic construct
AAGVTGWFQI

SEQ ID NO: 48309 - protein, 9 aa, synthetic construct
AAGEGWLKI

SEQ ID NO: 48310 - protein, 14 aa, synthetic construct
AAGELGIAPGWVKI

SEQ ID NO: 48311 - protein, 14 aa, synthetic construct
AAGEPGATTGWFKK

SEQ ID NO: 48312 - protein, 11 aa, synthetic construct
AAGEPPGWFKI

SEQ ID NO: 48313 - protein, 15 aa, synthetic construct
AAGERKGYTTGWFKI

SEQ ID NO: 48314 - protein, 13 aa, synthetic construct
AAGESGATGGGQI

SEQ ID NO: 48315 - protein, 12 aa, synthetic construct
AAGETGTGWFNI

SEQ ID NO: 48316 - protein, 12 aa, synthetic construct
AAGEVTKGWFNI

SEQ ID NO: 48317 - protein, 12 aa, synthetic construct
AAGEWGTGWLKI

SEQ ID NO: 48318 - protein, 12 aa, synthetic construct
AAGEWTTGWFKK

SEQ ID NO: 48319 - protein, 13 aa, synthetic construct
AAGEYNTTGWFKI

SEQ ID NO: 48320 - protein, 13 aa, synthetic construct
AAGEYYTTGWFKI

SEQ ID NO: 48321 - protein, 6 aa, synthetic construct
AAGFKL

SEQ ID NO: 48322 - protein, 6 aa, synthetic construct
AAGFKR

SEQ ID NO: 48323 - protein, 6 aa, synthetic construct
AAGFKV

SEQ ID NO: 48324 - protein, 6 aa, synthetic construct
AAGFQI

SEQ ID NO: 48325 - protein, 12 aa, synthetic construct
AAGGDPTGWFQI

SEQ ID NO: 48326 - protein, 12 aa, synthetic construct
AAGGDTTGWLKI

SEQ ID NO: 48327 - protein, 10 aa, synthetic construct
AAGGDYYKKL

SEQ ID NO: 48328 - protein, 13 aa, synthetic construct
AAGGEETTGWFKI

SEQ ID NO: 48329 - protein, 13 aa, synthetic construct
AAGELDTTGWVKI

SEQ ID NO: 48330 - protein, 13 aa, synthetic construct
AAGEGNTTGWFKI

SEQ ID NO: 48331 - protein, 12 aa, synthetic construct
AAGVSTTGWFKI

SEQ ID NO: 48332 - protein, 11 aa, synthetic construct
AAGEATGWFKI

SEQ ID NO: 48333 - protein, 8 aa, synthetic construct
AAGDYEKL

SEQ ID NO: 48334 - protein, 13 aa, synthetic construct
AAGDYEVTGWFKI

SEQ ID NO: 48335 - protein, 13 aa, synthetic construct
AAGDYGATGWFKI

SEQ ID NO: 48336 - protein, 12 aa, synthetic construct
AAGDYGTGWFKI

SEQ ID NO: 48337 - protein, 13 aa, synthetic construct
AAGDYHTTGWFKI

SEQ ID NO: 48338 - protein, 12 aa, synthetic construct
AAGDYITGWFKI

SEQ ID NO: 48339 - protein, 8 aa, synthetic construct
AAGDYKKL

SEQ ID NO: 48340 - protein, 13 aa, synthetic construct
AAGDYNAAGWFKI

SEQ ID NO: 48341 - protein, 14 aa, synthetic construct
AAGDYPFTTGWFKI

SEQ ID NO: 48342 - protein, 12 aa, synthetic construct
AAGDYPTGWFKI

SEQ ID NO: 48343 - protein, 11 aa, synthetic construct
AAGDYTGWFKI

SEQ ID NO: 48344 - protein, 12 aa, synthetic construct
AAGDYTTGWLNI

SEQ ID NO: 48345 - protein, 8 aa, synthetic construct
AAGDYVKL

SEQ ID NO: 48346 - protein, 9 aa, synthetic construct
AAGDYWFKI

SEQ ID NO: 48347 - protein, 9 aa, synthetic construct
AAGDYWFRV

SEQ ID NO: 48348 - protein, 14 aa, synthetic construct
AAGDYWLAPGWFKI

SEQ ID NO: 48349 - protein, 14 aa, synthetic construct
AAGDYWLSTGWFKI

SEQ ID NO: 48350 - protein, 14 aa, synthetic construct
AAGDYWYTTGWFKI

SEQ ID NO: 48351 - protein, 13 aa, synthetic construct
AAGDYYTTGWFKI

SEQ ID NO: 48352 - protein, 12 aa, synthetic construct
AAGGETTGWFKI

SEQ ID NO: 48353 - protein, 10 aa, synthetic construct
AAGGGGWFKI

SEQ ID NO: 48354 - protein, 13 aa, synthetic construct
AAGGGNTTGWFKI

SEQ ID NO: 48355 - protein, 13 aa, synthetic construct
AAGGGRRTGWFKI

SEQ ID NO: 48356 - protein, 12 aa, synthetic construct
AAGGYTTGWFNI

SEQ ID NO: 48357 - protein, 12 aa, synthetic construct
AAGGYTTGWVQI

SEQ ID NO: 48358 - protein, 6 aa, synthetic construct
AAGIKI

SEQ ID NO: 48359 - protein, 11 aa, synthetic construct
AAGNNTGWFKI

SEQ ID NO: 48360 - protein, 7 aa, synthetic construct
AAGPLKI

SEQ ID NO: 48361 - protein, 12 aa, synthetic construct
AAGPYTTGWFKI

SEQ ID NO: 48362 - protein, 7 aa, synthetic construct
AAGREKR

SEQ ID NO: 48363 - protein, 10 aa, synthetic construct
AAGRFGWFKI

SEQ ID NO: 48364 - protein, 11 aa, synthetic construct
AAGSTTGWFKI

SEQ ID NO: 48365 - protein, 10 aa, synthetic construct
AAGTTGGVEF

SEQ ID NO: 48366 - protein, 10 aa, synthetic construct
AAGTTGWFKI

SEQ ID NO: 48367 - protein, 9 aa, synthetic construct
AAGVGGFKI

SEQ ID NO: 48368 - protein, 9 aa, synthetic construct
AAGVGWFKI

SEQ ID NO: 48369 - protein, 12 aa, synthetic construct
AAGVHTTGWLKI

SEQ ID NO: 48370 - protein, 15 aa, synthetic construct
AAGVPEGSTTGWFKI

SEQ ID NO: 48371 - protein, 9 aa, synthetic construct
AAGVRWFKL

SEQ ID NO: 48372 - protein, 13 aa, synthetic construct
AAGVSGSAGWFKI

SEQ ID NO: 48373 - protein, 13 aa, synthetic construct
AAGVSGSTGLFKI

SEQ ID NO: 48374 - protein, 13 aa, synthetic construct
AAGVSGSTGWLKI

SEQ ID NO: 48375 - protein, 12 aa, synthetic construct
AAGGYTPGWFKI

SEQ ID NO: 48376 - protein, 12 aa, synthetic construct
AAGGYTHGWFKI

SEQ ID NO: 48377 - protein, 8 aa, synthetic construct
AAGGYKKL

SEQ ID NO: 48378 - protein, 11 aa, synthetic construct
AAGGPTGWCKI

SEQ ID NO: 48379 - protein, 10 aa, synthetic construct
AAGGGSYKKL

SEQ ID NO: 48380 - protein, 12 aa, synthetic construct
AAGGGTPGWFKI

SEQ ID NO: 48381 - protein, 12 aa, synthetic construct
AAGGHTTGWFNK

SEQ ID NO: 48382 - protein, 13 aa, synthetic construct
AAGGKYTTGWFKI

SEQ ID NO: 48383 - protein, 11 aa, synthetic construct
AAGGNNGWFKI

SEQ ID NO: 48384 - protein, 10 aa, synthetic construct
AAGGPGWFKI

SEQ ID NO: 48385 - protein, 10 aa, synthetic construct
AAGGPGWLQI

SEQ ID NO: 48386 - protein, 14 aa, synthetic construct
AAGGPLYTTGWFKI

SEQ ID NO: 48387 - protein, 11 aa, synthetic construct
AAGGPTGWFKI

SEQ ID NO: 48388 - protein, 8 aa, synthetic construct
AAGGYKEL

SEQ ID NO: 48389 - protein, 13 aa, synthetic construct
AAGGQYPTGWFKI

SEQ ID NO: 48390 - protein, 11 aa, synthetic construct
AAGGSTGWFKI

SEQ ID NO: 48391 - protein, 10 aa, synthetic construct
AAGGTGLLKI

SEQ ID NO: 48392 - protein, 10 aa, synthetic construct
AAGGTGWFYI

SEQ ID NO: 48393 - protein, 10 aa, synthetic construct
AAGGTGWVKI

SEQ ID NO: 48394 - protein, 11 aa, synthetic construct
AAGGTTGWFKM

SEQ ID NO: 48395 - protein, 12 aa, synthetic construct
AAGGTTTGWFKI

SEQ ID NO: 48396 - protein, 10 aa, synthetic construct
AAGGVGWFRV

SEQ ID NO: 48397 - protein, 12 aa, synthetic construct
AAWDCPTGWFKR

SEQ ID NO: 48398 - protein, 12 aa, synthetic construct
AAWDCRGGWFKT

SEQ ID NO: 48399 - protein, 13 aa, synthetic construct
AAWEGNTPGWFKI

SEQ ID NO: 48400 - protein, 11 aa, synthetic construct
AAWDTTGWFMI

SEQ ID NO: 48401 - protein, 11 aa, synthetic construct
AAWDTTGWLKV

SEQ ID NO: 48402 - protein, 11 aa, synthetic construct
AAWDTTGWLTI

SEQ ID NO: 48403 - protein, 11 aa, synthetic construct
AAWDTTRWFKI

SEQ ID NO: 48404 - protein, 12 aa, synthetic construct
AAWDTTTGWFKI

SEQ ID NO: 48405 - protein, 11 aa, synthetic construct
AAWDTTVWFKI

SEQ ID NO: 48406 - protein, 14 aa, synthetic construct
AAWDTVGTTGWFKI

SEQ ID NO: 48407 - protein, 12 aa, synthetic construct
AAWDTYHCWFKI

SEQ ID NO: 48408 - protein, 13 aa, synthetic construct
AAWDTYTTGWFKI

SEQ ID NO: 48409 - protein, 9 aa, synthetic construct
AAWDVCFKI

SEQ ID NO: 48410 - protein, 13 aa, synthetic construct
AAWDVHTTGWVKI

SEQ ID NO: 48411 - protein, 9 aa, synthetic construct
AAWDVMERL

SEQ ID NO: 48412 - protein, 13 aa, synthetic construct
AAWDVYTPGWFKI

SEQ ID NO: 48413 - protein, 12 aa, synthetic construct
AAWDWAPGWFKI

SEQ ID NO: 48414 - protein, 8 aa, synthetic construct
AAWDWCKI

SEQ ID NO: 48415 - protein, 10 aa, synthetic construct
AAWDWDCKKL

SEQ ID NO: 48416 - protein, 12 aa, synthetic construct
AAWDWDTGWFKI

SEQ ID NO: 48417 - protein, 8 aa, synthetic construct
AAWDWDTT

SEQ ID NO: 48418 - protein, 13 aa, synthetic construct
AAWDWDTTGWFKL

SEQ ID NO: 48419 - protein, 13 aa, synthetic construct
AAWDWDTTGWFNI

SEQ ID NO: 48420 - protein, 11 aa, synthetic construct
AAWDTTGWLKM

SEQ ID NO: 48421 - protein, 11 aa, synthetic construct
AAWDTTGWFKA

SEQ ID NO: 48422 - protein, 13 aa, synthetic construct
AAWDWDTTGWIKI

SEQ ID NO: 48423 - protein, 11 aa, synthetic construct
AAWDTTGWFGI

SEQ ID NO: 48424 - protein, 10 aa, synthetic construct
AAWDTGLFNI

SEQ ID NO: 48425 - protein, 10 aa, synthetic construct
AAWDTGRFKI

SEQ ID NO: 48426 - protein, 10 aa, synthetic construct
AAWDTGWFKL

SEQ ID NO: 48427 - protein, 10 aa, synthetic construct
AAWDTGWFKM

SEQ ID NO: 48428 - protein, 10 aa, synthetic construct
AAWDTGWFQI

SEQ ID NO: 48429 - protein, 10 aa, synthetic construct
AAWDTGWFRI

SEQ ID NO: 48430 - protein, 11 aa, synthetic construct
AAWDTIGWFKI

SEQ ID NO: 48431 - protein, 11 aa, synthetic construct
AAWDTKGWFKI

SEQ ID NO: 48432 - protein, 11 aa, synthetic construct
AAWDTPGGFKI

SEQ ID NO: 48433 - protein, 11 aa, synthetic construct
AAWDTPGWCKI

SEQ ID NO: 48434 - protein, 11 aa, synthetic construct
AAWDTPGWLKI

SEQ ID NO: 48435 - protein, 11 aa, synthetic construct
AAWDTPGWVKI

SEQ ID NO: 48436 - protein, 11 aa, synthetic construct
AAWDTPGWVTI

SEQ ID NO: 48437 - protein, 11 aa, synthetic construct
AAWDTPRWFKI

SEQ ID NO: 48438 - protein, 11 aa, synthetic construct
AAWDTRGWFWR

SEQ ID NO: 48439 - protein, 11 aa, synthetic construct
AAWDTTAWFKI

SEQ ID NO: 48440 - protein, 11 aa, synthetic construct
AAWDTTGCFMI

SEQ ID NO: 48441 - protein, 11 aa, synthetic construct
AAWDTTGLFNI

SEQ ID NO: 48442 - protein, 8 aa, synthetic construct
AAWDTTGW

SEQ ID NO: 48443 - protein, 13 aa, synthetic construct
AAWDWDTTGWFSI

SEQ ID NO: 48444 - protein, 13 aa, synthetic construct
AAWDWDTTGWLEI

SEQ ID NO: 48445 - protein, 14 aa, synthetic construct
AAWDTDGTTGWYKI

SEQ ID NO: 48446 - protein, 11 aa, synthetic construct
AAWDWPGWFKI

SEQ ID NO: 48447 - protein, 13 aa, synthetic construct
AAWDWRATDWFKI

SEQ ID NO: 48448 - protein, 13 aa, synthetic construct
AAWDWRATGWFNI

SEQ ID NO: 48449 - protein, 13 aa, synthetic construct
AAWDWRATGWVKI

SEQ ID NO: 48450 - protein, 12 aa, synthetic construct
AAWDWRGGWFRI

SEQ ID NO: 48451 - protein, 14 aa, synthetic construct
AAWDWRYTTGWFKI

SEQ ID NO: 48452 - protein, 8 aa, synthetic construct
AAWDWSKI

SEQ ID NO: 48453 - protein, 12 aa, synthetic construct
AAWDWSTGWFKI

SEQ ID NO: 48454 - protein, 12 aa, synthetic construct
AAWDWTAGWFKI

SEQ ID NO: 48455 - protein, 11 aa, synthetic construct
AAWDWTGLFEI

SEQ ID NO: 48456 - protein, 11 aa, synthetic construct
AAWDWTGWFEI

SEQ ID NO: 48457 - protein, 11 aa, synthetic construct
AAWDWTGWFKT

SEQ ID NO: 48458 - protein, 12 aa, synthetic construct
AAWDWTTDWFKI

SEQ ID NO: 48459 - protein, 12 aa, synthetic construct
AAWDWTTGWFKL

SEQ ID NO: 48460 - protein, 12 aa, synthetic construct
AAWDWTTGWFQI

SEQ ID NO: 48461 - protein, 12 aa, synthetic construct
AAWDWTTGWLNI

SEQ ID NO: 48462 - protein, 12 aa, synthetic construct
AAWDWTTGWSKL

SEQ ID NO: 48463 - protein, 12 aa, synthetic construct
AAWDWTTGWYKI

SEQ ID NO: 48464 - protein, 8 aa, synthetic construct
AAWDWVKI

SEQ ID NO: 48465 - protein, 12 aa, synthetic construct
AAWDWVTGWFKI

SEQ ID NO: 48466 - protein, 13 aa, synthetic construct
AAWDWRAAGWFKI

SEQ ID NO: 48467 - protein, 13 aa, synthetic construct
AAWDWNTTVWFKI

SEQ ID NO: 48468 - protein, 13 aa, synthetic construct
AAWDWDTTGWLKI

SEQ ID NO: 48469 - protein, 13 aa, synthetic construct
AAWDWNTTGWVKI

SEQ ID NO: 48470 - protein, 10 aa, synthetic construct
AAWDWDYNKL

SEQ ID NO: 48471 - protein, 15 aa, synthetic construct
AAWDWDYSTTGWFKI

SEQ ID NO: 48472 - protein, 10 aa, synthetic construct
AAWDWEYKKL

SEQ ID NO: 48473 - protein, 8 aa, synthetic construct
AAWDWFEI

SEQ ID NO: 48474 - protein, 12 aa, synthetic construct
AAWDWGSGWFKI

SEQ ID NO: 48475 - protein, 12 aa, synthetic construct
AAWDWGTCWFKI

SEQ ID NO: 48476 - protein, 12 aa, synthetic construct
AAWDWGTGLFKI

SEQ ID NO: 48477 - protein, 13 aa, synthetic construct
AAWDWGTGWFKKL

SEQ ID NO: 48478 - protein, 12 aa, synthetic construct
AAWDWGTGWLNI

SEQ ID NO: 48479 - protein, 12 aa, synthetic construct
AAWDWGTGWSKI

SEQ ID NO: 48480 - protein, 10 aa, synthetic construct
AAWDWGWFKI

SEQ ID NO: 48481 - protein, 13 aa, synthetic construct
AAWDWHTTGWFTI

SEQ ID NO: 48482 - protein, 11 aa, synthetic construct
AAAYTPGWFKI

SEQ ID NO: 48483 - protein, 11 aa, synthetic construct
AAWDWNGWFKI

SEQ ID NO: 48484 - protein, 13 aa, synthetic construct
AAWDWNNTGWFKI

SEQ ID NO: 48485 - protein, 13 aa, synthetic construct
AAWDWNNTGWFNI

SEQ ID NO: 48486 - protein, 12 aa, synthetic construct
AAWDWNTGWFKI

SEQ ID NO: 48487 - protein, 13 aa, synthetic construct
AAWDWNTTGWIKI

SEQ ID NO: 48488 - protein, 13 aa, synthetic construct
AAWDWNTTGWSKI

SEQ ID NO: 48489 - protein, 14 aa, synthetic construct
AAWDTGATTGWFKI

SEQ ID NO: 48490 - protein, 14 aa, synthetic construct
AAWDTDGTTGWFEI

SEQ ID NO: 48491 - protein, 12 aa, synthetic construct
AAWDCRGGWLKI

SEQ ID NO: 48492 - protein, 14 aa, synthetic construct
AAWDSGYTTGWFNI

SEQ ID NO: 48493 - protein, 13 aa, synthetic construct
AAWDSHTPGWFKI

SEQ ID NO: 48494 - protein, 13 aa, synthetic construct
AAWDSHTTGWFEI

SEQ ID NO: 48495 - protein, 13 aa, synthetic construct
AAWDSHTTGWFRI

SEQ ID NO: 48496 - protein, 13 aa, synthetic construct
AAWDSHTTSWFKI

SEQ ID NO: 48497 - protein, 13 aa, synthetic construct
AAWDSHTTVWFKI

SEQ ID NO: 48498 - protein, 14 aa, synthetic construct
AAWDSKYNTGWLKM

SEQ ID NO: 48499 - protein, 14 aa, synthetic construct
AAWDSKYTPGWFKI

SEQ ID NO: 48500 - protein, 14 aa, synthetic construct
AAWDSKYTTGWFKM

SEQ ID NO: 48501 - protein, 14 aa, synthetic construct
AAWDSKYTTGWSKI

SEQ ID NO: 48502 - protein, 14 aa, synthetic construct
AAWDSKYTTVLLKI

SEQ ID NO: 48503 - protein, 11 aa, synthetic construct
AAWDSLGWLKI

SEQ ID NO: 48504 - protein, 11 aa, synthetic construct
AAWDSLGWSKI

SEQ ID NO: 48505 - protein, 11 aa, synthetic construct
AAWDSLVWLKI

SEQ ID NO: 48506 - protein, 13 aa, synthetic construct
AAWDSNTSSWFKI

SEQ ID NO: 48507 - protein, 13 aa, synthetic construct
AAWDSNTTGGFKI

SEQ ID NO: 48508 - protein, 13 aa, synthetic construct
AAWDSNTTGLFKI

SEQ ID NO: 48509 - protein, 13 aa, synthetic construct
AAWDSNTTGRFKI

SEQ ID NO: 48510 - protein, 13 aa, synthetic construct
AAWDSNTTGWFDI

SEQ ID NO: 48511 - protein, 11 aa, synthetic construct
AAWDSNYYNKI

SEQ ID NO: 48512 - protein, 14 aa, synthetic construct
AAWDSGYTTGWLKI

SEQ ID NO: 48513 - protein, 14 aa, synthetic construct
AAWDSGYTSGWFKI

SEQ ID NO: 48514 - protein, 13 aa, synthetic construct
AAWDSPAPGLFKI

SEQ ID NO: 48515 - protein, 14 aa, synthetic construct
AAWDSGYTIGWFKI

SEQ ID NO: 48516 - protein, 13 aa, synthetic construct
AAWDSGATGWCKI

SEQ ID NO: 48517 - protein, 13 aa, synthetic construct
AAWDSGATRWFKI

SEQ ID NO: 48518 - protein, 13 aa, synthetic construct
AAWDSGGETCWLK

SEQ ID NO: 48519 - protein, 11 aa, synthetic construct
AAWDSGGLLKI

SEQ ID NO: 48520 - protein, 13 aa, synthetic construct
AAWDSGGNTGWFK

SEQ ID NO: 48521 - protein, 11 aa, synthetic construct
AAWDSGGWFKM

SEQ ID NO: 48522 - protein, 11 aa, synthetic construct
AAWDSGGWFNI

SEQ ID NO: 48523 - protein, 10 aa, synthetic construct
AAWDSGLLKI

SEQ ID NO: 48524 - protein, 12 aa, synthetic construct
AAWDSGSGWFKI

SEQ ID NO: 48525 - protein, 14 aa, synthetic construct
AAWDSGSTTGWFKI

SEQ ID NO: 48526 - protein, 12 aa, synthetic construct
AAWDSGTGRFKI

SEQ ID NO: 48527 - protein, 12 aa, synthetic construct
AAWDSGTGWFKV

SEQ ID NO: 48528 - protein, 12 aa, synthetic construct
AAWDSGTGWFQI

SEQ ID NO: 48529 - protein, 12 aa, synthetic construct
AAWDSGTGWFRI

SEQ ID NO: 48530 - protein, 13 aa, synthetic construct
AAWDSGTNGWLKI

SEQ ID NO: 48531 - protein, 13 aa, synthetic construct
AAWDSGTTELFKI

SEQ ID NO: 48532 - protein, 13 aa, synthetic construct
AAWDSGTTGWLKI

SEQ ID NO: 48533 - protein, 10 aa, synthetic construct
AAWDSGWFNI

SEQ ID NO: 48534 - protein, 10 aa, synthetic construct
AAWDSGYKKL

SEQ ID NO: 48535 - protein, 13 aa, synthetic construct
AAWDSPAIGWFKI

SEQ ID NO: 48536 - protein, 13 aa, synthetic construct
AAWDSPATGWFMI

SEQ ID NO: 48537 - protein, 5 aa, synthetic construct
AAWDT

SEQ ID NO: 48538 - protein, 12 aa, synthetic construct
AAWDSTTGWFEI

SEQ ID NO: 48539 - protein, 12 aa, synthetic construct
AAWDSTTGWLKI

SEQ ID NO: 48540 - protein, 12 aa, synthetic construct
AAWDSTTGWSKI

SEQ ID NO: 48541 - protein, 14 aa, synthetic construct
AAWDSTYNTGWFKI

SEQ ID NO: 48542 - protein, 11 aa, synthetic construct
AAWDSTYTTGW

SEQ ID NO: 48543 - protein, 14 aa, synthetic construct
AAWDSTYTTGWLKI

SEQ ID NO: 48544 - protein, 14 aa, synthetic construct
AAWDSTYTTGWYKI

SEQ ID NO: 48545 - protein, 11 aa, synthetic construct
AAWDSVGWLKI

SEQ ID NO: 48546 - protein, 12 aa, synthetic construct
AAWDSVTGWFKI

SEQ ID NO: 48547 - protein, 9 aa, synthetic construct
AAWDSWFKL

SEQ ID NO: 48548 - protein, 14 aa, synthetic construct
AAWDSWHTTGWFKI

SEQ ID NO: 48549 - protein, 9 aa, synthetic construct
AAWDSWVKI

SEQ ID NO: 48550 - protein, 13 aa, synthetic construct
AAWDSYTNGWFKI

SEQ ID NO: 48551 - protein, 13 aa, synthetic construct
AAWDSYTTGLFKI

SEQ ID NO: 48552 - protein, 13 aa, synthetic construct
AAWDSYTTGRSKI

SEQ ID NO: 48553 - protein, 13 aa, synthetic construct
AAWDSYTTGWFEI

SEQ ID NO: 48554 - protein, 13 aa, synthetic construct
AAWDSYTTGWFRI

SEQ ID NO: 48555 - protein, 10 aa, synthetic construct
AAWDSYYKKH

SEQ ID NO: 48556 - protein, 10 aa, synthetic construct
AAWDSYYKKI

SEQ ID NO: 48557 - protein, 10 aa, synthetic construct
AAWDSYYRKL

SEQ ID NO: 48558 - protein, 12 aa, synthetic construct
AAWDSTTGWFNI

SEQ ID NO: 48559 - protein, 12 aa, synthetic construct
AAWDSTTGRVKI

SEQ ID NO: 48560 - protein, 13 aa, synthetic construct
AAWDSPATGWFNI

SEQ ID NO: 48561 - protein, 12 aa, synthetic construct
AAWDSTTCWFNI

SEQ ID NO: 48562 - protein, 11 aa, synthetic construct
AAWDSPDYKKL

SEQ ID NO: 48563 - protein, 11 aa, synthetic construct
AAWDSPGWFKR

SEQ ID NO: 48564 - protein, 11 aa, synthetic construct
AAWDSPGWFQI

SEQ ID NO: 48565 - protein, 11 aa, synthetic construct
AAWDSPGWSKI

SEQ ID NO: 48566 - protein, 12 aa, synthetic construct
AAWDSPTGWFKI

SEQ ID NO: 48567 - protein, 11 aa, synthetic construct
AAWDSPYDKKN

SEQ ID NO: 48568 - protein, 11 aa, synthetic construct
AAWDSPYHKKL

SEQ ID NO: 48569 - protein, 11 aa, synthetic construct
AAWDSPYYKKH

SEQ ID NO: 48570 - protein, 13 aa, synthetic construct
AAWDSQTTGWFKI

SEQ ID NO: 48571 - protein, 14 aa, synthetic construct
AAWDSQYTTGWLKI

SEQ ID NO: 48572 - protein, 13 aa, synthetic construct
AAWDSRTPGWFKI

SEQ ID NO: 48573 - protein, 11 aa, synthetic construct
AAWDSTCWFKI

SEQ ID NO: 48574 - protein, 11 aa, synthetic construct
AAWDSTGWFEI

SEQ ID NO: 48575 - protein, 11 aa, synthetic construct
AAWDSTGWFKL

SEQ ID NO: 48576 - protein, 11 aa, synthetic construct
AAWDSTGWFKM

SEQ ID NO: 48577 - protein, 11 aa, synthetic construct
AAWDSTGWFKR

SEQ ID NO: 48578 - protein, 11 aa, synthetic construct
AAWDSTGWFKV

SEQ ID NO: 48579 - protein, 12 aa, synthetic construct
AAWDSTPGLFKI

SEQ ID NO: 48580 - protein, 12 aa, synthetic construct
AAWDSTSGWFKI

SEQ ID NO: 48581 - protein, 14 aa, synthetic construct
AAWDWVYTTGWFKI

SEQ ID NO: 48582 - protein, 9 aa, synthetic construct
AAWDWWFKI

SEQ ID NO: 48583 - protein, 10 aa, synthetic construct
AAWDWYYKKI

SEQ ID NO: 48584 - protein, 13 aa, synthetic construct
AAWDYSTTGWLKI

SEQ ID NO: 48585 - protein, 11 aa, synthetic construct
AAWDYTCWLKI

SEQ ID NO: 48586 - protein, 11 aa, synthetic construct
AAWDYTGLFKI

SEQ ID NO: 48587 - protein, 12 aa, synthetic construct
AAWDYTKFWFKI

SEQ ID NO: 48588 - protein, 12 aa, synthetic construct
AAWDYTPCWFKI

SEQ ID NO: 48589 - protein, 12 aa, synthetic construct
AAWDYTPGRFKI

SEQ ID NO: 48590 - protein, 9 aa, synthetic construct
AAWDYTPGW

SEQ ID NO: 48591 - protein, 12 aa, synthetic construct
AAWDYTPGWFQI

SEQ ID NO: 48592 - protein, 12 aa, synthetic construct
AAWDYTPGWLKI

SEQ ID NO: 48593 - protein, 13 aa, synthetic construct
AAWDYTPNAWLDK

SEQ ID NO: 48594 - protein, 12 aa, synthetic construct
AAWDYTSGWFKI

SEQ ID NO: 48595 - protein, 12 aa, synthetic construct
AAWDYTTCWFKL

SEQ ID NO: 48596 - protein, 12 aa, synthetic construct
AAWDYTTDWFKI

SEQ ID NO: 48597 - protein, 8 aa, synthetic construct
AAWDYTTG

SEQ ID NO: 48598 - protein, 12 aa, synthetic construct
AAWDYTTGCFKI

SEQ ID NO: 48599 - protein, 12 aa, synthetic construct
AAWDYTTGGFKI

SEQ ID NO: 48600 - protein, 12 aa, synthetic construct
AAWDYTTGWFHI

SEQ ID NO: 48601 - protein, 12 aa, synthetic construct
AAWDYTTGWFKK

SEQ ID NO: 48602 - protein, 12 aa, synthetic construct
AAWDYTTGWFKT

SEQ ID NO: 48603 - protein, 12 aa, synthetic construct
AAWDYTTGWFMI

SEQ ID NO: 48604 - protein, 11 aa, synthetic construct
AAWDYTCWFKI

SEQ ID NO: 48605 - protein, 13 aa, synthetic construct
AAWDYSTTGWFTI

SEQ ID NO: 48606 - protein, 12 aa, synthetic construct
AAWDYTTGWLNI

SEQ ID NO: 48607 - protein, 13 aa, synthetic construct
AAWDYSTTGGFKI

SEQ ID NO: 48608 - protein, 13 aa, synthetic construct
AAWDYRGTGLFKI

SEQ ID NO: 48609 - protein, 13 aa, synthetic construct
AAWDYRGTGWFNI

SEQ ID NO: 48610 - protein, 12 aa, synthetic construct
AAWDYRLRWFKI

SEQ ID NO: 48611 - protein, 13 aa, synthetic construct
AAWDYRPPGWFKI

SEQ ID NO: 48612 - protein, 13 aa, synthetic construct
AAWDYRPTGLFKI

SEQ ID NO: 48613 - protein, 13 aa, synthetic construct
AAWDYRPTGRFKI

SEQ ID NO: 48614 - protein, 13 aa, synthetic construct
AAWDYRPTGWFEI

SEQ ID NO: 48615 - protein, 12 aa, synthetic construct
AAWDYRTGWFKT

SEQ ID NO: 48616 - protein, 12 aa, synthetic construct
AAWDYRTGWFTI

SEQ ID NO: 48617 - protein, 12 aa, synthetic construct
AAWDYRVGWFKV

SEQ ID NO: 48618 - protein, 12 aa, synthetic construct
AAWDYRVGWSKI

SEQ ID NO: 48619 - protein, 11 aa, synthetic construct
AAWDYRYYKKL

SEQ ID NO: 48620 - protein, 9 aa, synthetic construct
AAWDYSKKI

SEQ ID NO: 48621 - protein, 12 aa, synthetic construct
AAWDYSPGWFKI

SEQ ID NO: 48622 - protein, 12 aa, synthetic construct
AAWDYSTGLFKI

SEQ ID NO: 48623 - protein, 12 aa, synthetic construct
AAWDYSTGWFKR

SEQ ID NO: 48624 - protein, 12 aa, synthetic construct
AAWDYSTGWLKI

SEQ ID NO: 48625 - protein, 13 aa, synthetic construct
AAWDYSTPGWFKI

SEQ ID NO: 48626 - protein, 12 aa, synthetic construct
AAWDYSTSWFKI

SEQ ID NO: 48627 - protein, 12 aa, synthetic construct
AAWDYTTGWLEI

SEQ ID NO: 48628 - protein, 12 aa, synthetic construct
AAWDYTTGWVKI

SEQ ID NO: 48629 - protein, 11 aa, synthetic construct
AAWDYAGWLKI

SEQ ID NO: 48630 - protein, 10 aa, synthetic construct
AAWECGWFKI

SEQ ID NO: 48631 - protein, 12 aa, synthetic construct
AAWECTPGWFKI

SEQ ID NO: 48632 - protein, 13 aa, synthetic construct
AAWECVPTRWFKI

SEQ ID NO: 48633 - protein, 9 aa, synthetic construct
AAWECWFKI

SEQ ID NO: 48634 - protein, 13 aa, synthetic construct
AAWEDDTTGLFNI

SEQ ID NO: 48635 - protein, 13 aa, synthetic construct
AAWEDGATGWFTI

SEQ ID NO: 48636 - protein, 12 aa, synthetic construct
AAWEDNTGWFKI

SEQ ID NO: 48637 - protein, 12 aa, synthetic construct
AAWEDPTGWFKI

SEQ ID NO: 48638 - protein, 12 aa, synthetic construct
AAWEDTSGWFKI

SEQ ID NO: 48639 - protein, 12 aa, synthetic construct
AAWEDTTGGFKI

SEQ ID NO: 48640 - protein, 12 aa, synthetic construct
AAWEDTTGWFKL

SEQ ID NO: 48641 - protein, 12 aa, synthetic construct
AAWEDTTGWLKI

SEQ ID NO: 48642 - protein, 12 aa, synthetic construct
AAWEDTTGWVKI

SEQ ID NO: 48643 - protein, 12 aa, synthetic construct
AAWEDTTGWVMI

SEQ ID NO: 48644 - protein, 10 aa, synthetic construct
AAWEDYYKKL

SEQ ID NO: 48645 - protein, 9 aa, synthetic construct
AAWEEDKKL

SEQ ID NO: 48646 - protein, 12 aa, synthetic construct
AAWEENTCWLKI

SEQ ID NO: 48647 - protein, 13 aa, synthetic construct
AAWEFGTTGWFKI

SEQ ID NO: 48648 - protein, 12 aa, synthetic construct
AAWEFSTGWFKI

SEQ ID NO: 48649 - protein, 13 aa, synthetic construct
AAWEGNITGWFKI

SEQ ID NO: 48650 - protein, 12 aa, synthetic construct
AAWECNTGWFKI

SEQ ID NO: 48651 - protein, 12 aa, synthetic construct
AAWECATGWFKI

SEQ ID NO: 48652 - protein, 12 aa, synthetic construct
AAWDYTTGWYKI

SEQ ID NO: 48653 - protein, 12 aa, synthetic construct
AAWECATGLFKI

SEQ ID NO: 48654 - protein, 12 aa, synthetic construct
AAWDYTTSWFKI

SEQ ID NO: 48655 - protein, 14 aa, synthetic construct
AAWDYTYNNGWFKI

SEQ ID NO: 48656 - protein, 14 aa, synthetic construct
AAWDYTYTTGLFKI

SEQ ID NO: 48657 - protein, 14 aa, synthetic construct
AAWDYTYTTGRFKI

SEQ ID NO: 48658 - protein, 13 aa, synthetic construct
AAWDYVATGWFKI

SEQ ID NO: 48659 - protein, 14 aa, synthetic construct
AAWDYVGNTGWFKI

SEQ ID NO: 48660 - protein, 9 aa, synthetic construct
AAWDYWFNI

SEQ ID NO: 48661 - protein, 12 aa, synthetic construct
AAWDYWVGWFKI

SEQ ID NO: 48662 - protein, 14 aa, synthetic construct
AAWDYWYTTGLFKI

SEQ ID NO: 48663 - protein, 9 aa, synthetic construct
AAWDYYEKL

SEQ ID NO: 48664 - protein, 9 aa, synthetic construct
AAWDYYKKI

SEQ ID NO: 48665 - protein, 9 aa, synthetic construct
AAWDYYNKI

SEQ ID NO: 48666 - protein, 13 aa, synthetic construct
AAWDYYTSGWFKI

SEQ ID NO: 48667 - protein, 13 aa, synthetic construct
AAWDYYTTGWVKI

SEQ ID NO: 48668 - protein, 14 aa, synthetic construct
AAWEAGANTGWFKK

SEQ ID NO: 48669 - protein, 11 aa, synthetic construct
AAWEATGLFNI

SEQ ID NO: 48670 - protein, 11 aa, synthetic construct
AAWEATGWFKM

SEQ ID NO: 48671 - protein, 11 aa, synthetic construct
AAWEATGWFNI

SEQ ID NO: 48672 - protein, 11 aa, synthetic construct
AAWEATGWFTI

SEQ ID NO: 48673 - protein, 13 aa, synthetic construct
AAWDYRATGWLKI

SEQ ID NO: 48674 - protein, 13 aa, synthetic construct
AAWDYRATGCFKI

SEQ ID NO: 48675 - protein, 13 aa, synthetic construct
AAWDYRAPGWVKI

SEQ ID NO: 48676 - protein, 14 aa, synthetic construct
AAWDYGPSTGGFKI

SEQ ID NO: 48677 - protein, 14 aa, synthetic construct
AAWDYGPTTGWFKI

SEQ ID NO: 48678 - protein, 14 aa, synthetic construct
AAWDYGPTTGWLKI

SEQ ID NO: 48679 - protein, 12 aa, synthetic construct
AAWDYGTGWFKV

SEQ ID NO: 48680 - protein, 13 aa, synthetic construct
AAWDYGTTGWFKI

SEQ ID NO: 48681 - protein, 10 aa, synthetic construct
AAWDYGWFKI

SEQ ID NO: 48682 - protein, 9 aa, synthetic construct
AAWDYHKKL

SEQ ID NO: 48683 - protein, 12 aa, synthetic construct
AAWDYHTGWFKI

SEQ ID NO: 48684 - protein, 12 aa, synthetic construct
AAWDYIIGWFKI

SEQ ID NO: 48685 - protein, 9 aa, synthetic construct
AAWDYIKKL

SEQ ID NO: 48686 - protein, 12 aa, synthetic construct
AAWDYITGWFQI

SEQ ID NO: 48687 - protein, 12 aa, synthetic construct
AAWDYITGWINK

SEQ ID NO: 48688 - protein, 13 aa, synthetic construct
AAWDYITTGLFKI

SEQ ID NO: 48689 - protein, 12 aa, synthetic construct
AAWDYITVWFKI

SEQ ID NO: 48690 - protein, 12 aa, synthetic construct
AAWDYKEYYKKH

SEQ ID NO: 48691 - protein, 12 aa, synthetic construct
AAWDYKEYYKKI

SEQ ID NO: 48692 - protein, 12 aa, synthetic construct
AAWDYKEYYKKL

SEQ ID NO: 48693 - protein, 12 aa, synthetic construct
AAWDYKEYYKKP

SEQ ID NO: 48694 - protein, 8 aa, synthetic construct
AAWDYKKH

SEQ ID NO: 48695 - protein, 12 aa, synthetic construct
AAWDYKTGWFNI

SEQ ID NO: 48696 - protein, 13 aa, synthetic construct
AAWDYGPTGWFEI

SEQ ID NO: 48697 - protein, 14 aa, synthetic construct
AAWDYGPSSGWFKI

SEQ ID NO: 48698 - protein, 13 aa, synthetic construct
AAWDYRAAGWFKI

SEQ ID NO: 48699 - protein, 8 aa, synthetic construct
AAWDYGKL

SEQ ID NO: 48700 - protein, 8 aa, synthetic construct
AAWDYATG

SEQ ID NO: 48701 - protein, 12 aa, synthetic construct
AAWDYATGWFRI

SEQ ID NO: 48702 - protein, 12 aa, synthetic construct
AAWDYATGWLNI

SEQ ID NO: 48703 - protein, 13 aa, synthetic construct
AAWDYDAPGWFKI

SEQ ID NO: 48704 - protein, 13 aa, synthetic construct
AAWDYDASGWFKI

SEQ ID NO: 48705 - protein, 11 aa, synthetic construct
AAWDYDCYKKL

SEQ ID NO: 48706 - protein, 11 aa, synthetic construct
AAWDYDYFKKL

SEQ ID NO: 48707 - protein, 10 aa, synthetic construct
AAWDYDYKKN

SEQ ID NO: 48708 - protein, 10 aa, synthetic construct
AAWDYDYRKL

SEQ ID NO: 48709 - protein, 11 aa, synthetic construct
AAWDYDYYKKI

SEQ ID NO: 48710 - protein, 13 aa, synthetic construct
AAWDYEATGWFKI

SEQ ID NO: 48711 - protein, 11 aa, synthetic construct
AAWDYEGWFKR

SEQ ID NO: 48712 - protein, 11 aa, synthetic construct
AAWDYEGWFKV

SEQ ID NO: 48713 - protein, 13 aa, synthetic construct
AAWDYEVPGWFKI

SEQ ID NO: 48714 - protein, 13 aa, synthetic construct
AAWDYEVTGWFNI

SEQ ID NO: 48715 - protein, 13 aa, synthetic construct
AAWDYEVTGWLKT

SEQ ID NO: 48716 - protein, 13 aa, synthetic construct
AAWDYGATGWFNI

SEQ ID NO: 48717 - protein, 13 aa, synthetic construct
AAWDYGATGWLKI

SEQ ID NO: 48718 - protein, 13 aa, synthetic construct
AAWDYGATGWSKI

SEQ ID NO: 48719 - protein, 14 aa, synthetic construct
AAWDYKYTTGWFKI

SEQ ID NO: 48720 - protein, 11 aa, synthetic construct
AAWDYLGWFKI

SEQ ID NO: 48721 - protein, 13 aa, synthetic construct
AAWDYMAQGLLKK

SEQ ID NO: 48722 - protein, 12 aa, synthetic construct
AAWDYMSGWFKI

SEQ ID NO: 48723 - protein, 14 aa, synthetic construct
AAWDYPFTTGRFKI

SEQ ID NO: 48724 - protein, 14 aa, synthetic construct
AAWDYPFTTGWFEI

SEQ ID NO: 48725 - protein, 14 aa, synthetic construct
AAWDYPFTTGWFRI

SEQ ID NO: 48726 - protein, 14 aa, synthetic construct
AAWDYPFTTSWFKI

SEQ ID NO: 48727 - protein, 14 aa, synthetic construct
AAWDYPGTPGWFKI

SEQ ID NO: 48728 - protein, 14 aa, synthetic construct
AAWDYPGTSGWFKI

SEQ ID NO: 48729 - protein, 14 aa, synthetic construct
AAWDYPGTTGRFKI

SEQ ID NO: 48730 - protein, 14 aa, synthetic construct
AAWDYPGTTGWLKI

SEQ ID NO: 48731 - protein, 14 aa, synthetic construct
AAWDYPGTTGWYKI

SEQ ID NO: 48732 - protein, 11 aa, synthetic construct
AAWDYPGWLKI

SEQ ID NO: 48733 - protein, 12 aa, synthetic construct
AAWDYPIGWFKI

SEQ ID NO: 48734 - protein, 14 aa, synthetic construct
AAWDYPLTTGWFKI

SEQ ID NO: 48735 - protein, 12 aa, synthetic construct
AAWDYPNGWFKI

SEQ ID NO: 48736 - protein, 12 aa, synthetic construct
AAWDYPTCWFKI

SEQ ID NO: 48737 - protein, 12 aa, synthetic construct
AAWDYPTGWFKL

SEQ ID NO: 48738 - protein, 12 aa, synthetic construct
AAWDYPTGWFKM

SEQ ID NO: 48739 - protein, 12 aa, synthetic construct
AAWDYPTGWLNI

SEQ ID NO: 48740 - protein, 12 aa, synthetic construct
AAWDYPTGWVEI

SEQ ID NO: 48741 - protein, 12 aa, synthetic construct
AAWDYPTGWYKI

SEQ ID NO: 48742 - protein, 14 aa, synthetic construct
AAWDYPFPPGWLKI

SEQ ID NO: 48743 - protein, 13 aa, synthetic construct
AAWDYPATGWFKI

SEQ ID NO: 48744 - protein, 12 aa, synthetic construct
AAWDYPAGWFKI

SEQ ID NO: 48745 - protein, 8 aa, synthetic construct
AAWDYNKI

SEQ ID NO: 48746 - protein, 12 aa, synthetic construct
AAWDYMTGWFKI

SEQ ID NO: 48747 - protein, 13 aa, synthetic construct
AAWDYNAAGLFKI

SEQ ID NO: 48748 - protein, 13 aa, synthetic construct
AAWDYNAAGLLKI

SEQ ID NO: 48749 - protein, 13 aa, synthetic construct
AAWDYNAAGWFKM

SEQ ID NO: 48750 - protein, 13 aa, synthetic construct
AAWDYNAAGWFKV

SEQ ID NO: 48751 - protein, 13 aa, synthetic construct
AAWDYNAAGWFNI

SEQ ID NO: 48752 - protein, 13 aa, synthetic construct
AAWDYNAAGWFTI

SEQ ID NO: 48753 - protein, 11 aa, synthetic construct
AAWDYNGWFNI

SEQ ID NO: 48754 - protein, 9 aa, synthetic construct
AAWDYNKKL

SEQ ID NO: 48755 - protein, 11 aa, synthetic construct
AAWDYNWLFKI

SEQ ID NO: 48756 - protein, 12 aa, synthetic construct
AAWDYNRSWFKI

SEQ ID NO: 48757 - protein, 12 aa, synthetic construct
AAWDYNSGWFKI

SEQ ID NO: 48758 - protein, 12 aa, synthetic construct
AAWDYNTCWFKI

SEQ ID NO: 48759 - protein, 12 aa, synthetic construct
AAWDYNTGWLKL

SEQ ID NO: 48760 - protein, 12 aa, synthetic construct
AAWDYNTGWVKI

SEQ ID NO: 48761 - protein, 13 aa, synthetic construct
AAWDYNTTGWFKL

SEQ ID NO: 48762 - protein, 13 aa, synthetic construct
AAWDYNTTGWFKV

SEQ ID NO: 48763 - protein, 12 aa, synthetic construct
AAWDYNTVWFKI

SEQ ID NO: 48764 - protein, 13 aa, synthetic construct
AAWDSGATGLFKI

SEQ ID NO: 48765 - protein, 13 aa, synthetic construct
AAWDSETPGWCKI

SEQ ID NO: 48766 - protein, 13 aa, synthetic construct
AAWDSEATGWVKI

SEQ ID NO: 48767 - protein, 9 aa, synthetic construct
AAWDFWFKR

SEQ ID NO: 48768 - protein, 9 aa, synthetic construct
AAWDFWLKI

SEQ ID NO: 48769 - protein, 13 aa, synthetic construct
AAWDFWTTGWFKI

SEQ ID NO: 48770 - protein, 9 aa, synthetic construct
AAWDFYKKH

SEQ ID NO: 48771 - protein, 9 aa, synthetic construct
AAWDFYKKI

SEQ ID NO: 48772 - protein, 9 aa, synthetic construct
AAWDFYNKL

SEQ ID NO: 48773 - protein, 12 aa, synthetic construct
AAWDFYTGWFNI

SEQ ID NO: 48774 - protein, 13 aa, synthetic construct
AAWDFYTTGWFKI

SEQ ID NO: 48775 - protein, 12 aa, synthetic construct
AAWDGATGWLKI

SEQ ID NO: 48776 - protein, 10 aa, synthetic construct
AAWDGGRSRI

SEQ ID NO: 48777 - protein, 10 aa, synthetic construct
AAWDGGWFKL

SEQ ID NO: 48778 - protein, 10 aa, synthetic construct
AAWDGGWFKV

SEQ ID NO: 48779 - protein, 10 aa, synthetic construct
AAWDGGWFNI

SEQ ID NO: 48780 - protein, 10 aa, synthetic construct
AAWDGGWFNK

SEQ ID NO: 48781 - protein, 10 aa, synthetic construct
AAWDGGWFQI

SEQ ID NO: 48782 - protein, 10 aa, synthetic construct
AAWDGGWSKI

SEQ ID NO: 48783 - protein, 9 aa, synthetic construct
AAWDGWLKI

SEQ ID NO: 48784 - protein, 10 aa, synthetic construct
AAWDHCWFKI

SEQ ID NO: 48785 - protein, 14 aa, synthetic construct
AAWDHLYTTGWFKI

SEQ ID NO: 48786 - protein, 14 aa, synthetic construct
AAWDHPFTTGWFKI

SEQ ID NO: 48787 - protein, 9 aa, synthetic construct
AAWDFWFNI

SEQ ID NO: 48788 - protein, 10 aa, synthetic construct
AAWDFVWLKI

SEQ ID NO: 48789 - protein, 11 aa, synthetic construct
AAWDHPGWFEI

SEQ ID NO: 48790 - protein, 13 aa, synthetic construct
AAWDFVTTGWFKI

SEQ ID NO: 48791 - protein, 11 aa, synthetic construct
AAWDFRYYNKH

SEQ ID NO: 48792 - protein, 11 aa, synthetic construct
AAWDFRYYNKL

SEQ ID NO: 48793 - protein, 12 aa, synthetic construct
AAWDFSTGRLNI

SEQ ID NO: 48794 - protein, 11 aa, synthetic construct
AAWDFTGRFKI

SEQ ID NO: 48795 - protein, 11 aa, synthetic construct
AAWDFTGWFKK

SEQ ID NO: 48796 - protein, 11 aa, synthetic construct
AAWDFTGWFKV

SEQ ID NO: 48797 - protein, 11 aa, synthetic construct
AAWDFTGWFNI

SEQ ID NO: 48798 - protein, 11 aa, synthetic construct
AAWDFTGWLKI

SEQ ID NO: 48799 - protein, 11 aa, synthetic construct
AAWDFTGWSKI

SEQ ID NO: 48800 - protein, 11 aa, synthetic construct
AAWDFTGWVKI

SEQ ID NO: 48801 - protein, 14 aa, synthetic construct
AAWDFTHTTGWFKI

SEQ ID NO: 48802 - protein, 12 aa, synthetic construct
AAWDFTKGWFKI

SEQ ID NO: 48803 - protein, 12 aa, synthetic construct
AAWDFTNGWFNI

SEQ ID NO: 48804 - protein, 12 aa, synthetic construct
AAWDFTPGWFKI

SEQ ID NO: 48805 - protein, 12 aa, synthetic construct
AAWDFTSGWFKI

SEQ ID NO: 48806 - protein, 12 aa, synthetic construct
AAWDFTTGLFKI

SEQ ID NO: 48807 - protein, 12 aa, synthetic construct
AAWDFTTGWFNI

SEQ ID NO: 48808 - protein, 12 aa, synthetic construct
AAWDFTTGWFRI

SEQ ID NO: 48809 - protein, 13 aa, synthetic construct
AAWDFVTPGWFKI

SEQ ID NO: 48810 - protein, 11 aa, synthetic construct
AAWDHPGLFNI

SEQ ID NO: 48811 - protein, 11 aa, synthetic construct
AAWDHPGWFNI

SEQ ID NO: 48812 - protein, 14 aa, synthetic construct
AAWDLGIATGWFKM

SEQ ID NO: 48813 - protein, 13 aa, synthetic construct
AAWDKGTTGWFKT

SEQ ID NO: 48814 - protein, 7 aa, synthetic construct
AAWDKKI

SEQ ID NO: 48815 - protein, 11 aa, synthetic construct
AAWDKTGWFNK

SEQ ID NO: 48816 - protein, 11 aa, synthetic construct
AAWDKTVLFKI

SEQ ID NO: 48817 - protein, 13 aa, synthetic construct
AAWDKVTTGWFKI

SEQ ID NO: 48818 - protein, 12 aa, synthetic construct
AAWDLAPGWFKI

SEQ ID NO: 48819 - protein, 12 aa, synthetic construct
AAWDLATGWFKL

SEQ ID NO: 48820 - protein, 12 aa, synthetic construct
AAWDLATGWFNI

SEQ ID NO: 48821 - protein, 13 aa, synthetic construct
AAWDLATTGWFKI

SEQ ID NO: 48822 - protein, 13 aa, synthetic construct
AAWDLDNTGWFKI

SEQ ID NO: 48823 - protein, 13 aa, synthetic construct
AAWDLDTAGWFKI

SEQ ID NO: 48824 - protein, 13 aa, synthetic construct
AAWDLDTPGWFKI

SEQ ID NO: 48825 - protein, 13 aa, synthetic construct
AAWDLDTTGWFKT

SEQ ID NO: 48826 - protein, 13 aa, synthetic construct
AAWDLDTTGWLKI

SEQ ID NO: 48827 - protein, 13 aa, synthetic construct
AAWDLDTTGWVKV

SEQ ID NO: 48828 - protein, 13 aa, synthetic construct
AAWDLDTTGWYKI

SEQ ID NO: 48829 - protein, 13 aa, synthetic construct
AAWDLDTTSWFKI

SEQ ID NO: 48830 - protein, 14 aa, synthetic construct
AAWDLEDTPGWFKI

SEQ ID NO: 48831 - protein, 14 aa, synthetic construct
AAWDLEDTTGLFKI

SEQ ID NO: 48832 - protein, 14 aa, synthetic construct
AAWDLEDTTGWFKK

SEQ ID NO: 48833 - protein, 13 aa, synthetic construct
AAWDKGTTGWFMI

SEQ ID NO: 48834 - protein, 13 aa, synthetic construct
AAWDKGTKGWFKI

SEQ ID NO: 48835 - protein, 13 aa, synthetic construct
AAWDHRATGWFKI

SEQ ID NO: 48836 - protein, 12 aa, synthetic construct
AAWDKGHCWFKI

SEQ ID NO: 48837 - protein, 12 aa, synthetic construct
AAWDHTAGWFKI

SEQ ID NO: 48838 - protein, 12 aa, synthetic construct
AAWDHTPGWFKI

SEQ ID NO: 48839 - protein, 12 aa, synthetic construct
AAWDHTSGWFKI

SEQ ID NO: 48840 - protein, 12 aa, synthetic construct
AAWDHTTGLFKI

SEQ ID NO: 48841 - protein, 12 aa, synthetic construct
AAWDHTTGWFKT

SEQ ID NO: 48842 - protein, 12 aa, synthetic construct
AAWDHTTGWFKV

SEQ ID NO: 48843 - protein, 12 aa, synthetic construct
AAWDHTTGWFNI

SEQ ID NO: 48844 - protein, 14 aa, synthetic construct
AAWDHWYTTGWFKI

SEQ ID NO: 48845 - protein, 13 aa, synthetic construct
AAWDHYTTGWFKI

SEQ ID NO: 48846 - protein, 12 aa, synthetic construct
AAWDIDTGWFKI

SEQ ID NO: 48847 - protein, 11 aa, synthetic construct
AAWDIGGWFKI

SEQ ID NO: 48848 - protein, 11 aa, synthetic construct
AAWDIGGWLKI

SEQ ID NO: 48849 - protein, 10 aa, synthetic construct
AAWDIGWFKI

SEQ ID NO: 48850 - protein, 14 aa, synthetic construct
AAWDIPHTTGWFKI

SEQ ID NO: 48851 - protein, 11 aa, synthetic construct
AAWDITCWFRI

SEQ ID NO: 48852 - protein, 11 aa, synthetic construct
AAWDITGWFRI

SEQ ID NO: 48853 - protein, 12 aa, synthetic construct
AAWDITTGWFKI

SEQ ID NO: 48854 - protein, 9 aa, synthetic construct
AAWDIYKKL

SEQ ID NO: 48855 - protein, 14 aa, synthetic construct
AAWDKDGTTGWFKI

SEQ ID NO: 48856 - protein, 11 aa, synthetic construct
AAWDFRSYKKL

SEQ ID NO: 48857 - protein, 12 aa, synthetic construct
AAWDFPTGWFKI

SEQ ID NO: 48858 - protein, 11 aa, synthetic construct
AAWDFPSNNKL

SEQ ID NO: 48859 - protein, 12 aa, synthetic construct
AAWDDATGWFKI

SEQ ID NO: 48860 - protein, 13 aa, synthetic construct
AAWDDDTTCWFKI

SEQ ID NO: 48861 - protein, 13 aa, synthetic construct
AAWDDDTTGLFKI

SEQ ID NO: 48862 - protein, 13 aa, synthetic construct
AAWDDDTTGWFKT

SEQ ID NO: 48863 - protein, 13 aa, synthetic construct
AAWDDETTGWFKI

SEQ ID NO: 48864 - protein, 12 aa, synthetic construct
AAWDDNTGWLKI

SEQ ID NO: 48865 - protein, 13 aa, synthetic construct
AAWDDNTTGWFKI

SEQ ID NO: 48866 - protein, 12 aa, synthetic construct
AAWDDPTGWFKI

SEQ ID NO: 48867 - protein, 11 aa, synthetic construct
AAWDDTGWFKI

SEQ ID NO: 48868 - protein, 12 aa, synthetic construct
AAWDDTIGWFKI

SEQ ID NO: 48869 - protein, 12 aa, synthetic construct
AAWDDTNGWFKI

SEQ ID NO: 48870 - protein, 12 aa, synthetic construct
AAWDDTPGWFKI

SEQ ID NO: 48871 - protein, 8 aa, synthetic construct
AAWDDTTG

SEQ ID NO: 48872 - protein, 12 aa, synthetic construct
AAWDDTTGGFKI

SEQ ID NO: 48873 - protein, 12 aa, synthetic construct
AAWDDTTGLFKI

SEQ ID NO: 48874 - protein, 12 aa, synthetic construct
AAWDDTTGRFKI

SEQ ID NO: 48875 - protein, 12 aa, synthetic construct
AAWDDTTGWFKL

SEQ ID NO: 48876 - protein, 12 aa, synthetic construct
AAWDDTTGWFKT

SEQ ID NO: 48877 - protein, 12 aa, synthetic construct
AAWDDTTGWFQV

SEQ ID NO: 48878 - protein, 12 aa, synthetic construct
AAWDDTTGWFRI

SEQ ID NO: 48879 - protein, 13 aa, synthetic construct
AAWDDDTNGWFKI

SEQ ID NO: 48880 - protein, 9 aa, synthetic construct
AAWDCWSKI

SEQ ID NO: 48881 - protein, 11 aa, synthetic construct
AAWDFPSNKRL

SEQ ID NO: 48882 - protein, 9 aa, synthetic construct
AAWDCWLKI

SEQ ID NO: 48883 - protein, 13 aa, synthetic construct
AAWDCRGTGWFKI

SEQ ID NO: 48884 - protein, 12 aa, synthetic construct
AAWDCTAGWFKI

SEQ ID NO: 48885 - protein, 11 aa, synthetic construct
AAWDCTGLFKI

SEQ ID NO: 48886 - protein, 11 aa, synthetic construct
AAWDCTGLLKI

SEQ ID NO: 48887 - protein, 11 aa, synthetic construct
AAWDCTGWFRI

SEQ ID NO: 48888 - protein, 11 aa, synthetic construct
AAWDCTGWSKI

SEQ ID NO: 48889 - protein, 11 aa, synthetic construct
AAWDCTGWVKI

SEQ ID NO: 48890 - protein, 12 aa, synthetic construct
AAWDCTTCWFKI

SEQ ID NO: 48891 - protein, 12 aa, synthetic construct
AAWDCTTGCFQI

SEQ ID NO: 48892 - protein, 12 aa, synthetic construct
AAWDCTTGLFKI

SEQ ID NO: 48893 - protein, 12 aa, synthetic construct
AAWDCTTGRFKI

SEQ ID NO: 48894 - protein, 12 aa, synthetic construct
AAWDCTTGWFKV

SEQ ID NO: 48895 - protein, 12 aa, synthetic construct
AAWDCTTGWFNI

SEQ ID NO: 48896 - protein, 12 aa, synthetic construct
AAWDCTTGWSKI

SEQ ID NO: 48897 - protein, 13 aa, synthetic construct
AAWDCVPPGWFKI

SEQ ID NO: 48898 - protein, 13 aa, synthetic construct
AAWDCVPTGRFKI

SEQ ID NO: 48899 - protein, 13 aa, synthetic construct
AAWDCVPTGWFRI

SEQ ID NO: 48900 - protein, 9 aa, synthetic construct
AAWDCWFKK

SEQ ID NO: 48901 - protein, 9 aa, synthetic construct
AAWDCWFKR

SEQ ID NO: 48902 - protein, 12 aa, synthetic construct
AAWDDTTGWLNI

SEQ ID NO: 48903 - protein, 13 aa, synthetic construct
AAWDDVTTGWFKI

SEQ ID NO: 48904 - protein, 9 aa, synthetic construct
AAWDDWFEI

SEQ ID NO: 48905 - protein, 9 aa, synthetic construct
AAWDEDKKL

SEQ ID NO: 48906 - protein, 12 aa, synthetic construct
AAWDFGTGWFKI

SEQ ID NO: 48907 - protein, 13 aa, synthetic construct
AAWDFGTPGWFKI

SEQ ID NO: 48908 - protein, 13 aa, synthetic construct
AAWDFGTTGLFKI

SEQ ID NO: 48909 - protein, 13 aa, synthetic construct
AAWDFGTTGWFEI

SEQ ID NO: 48910 - protein, 13 aa, synthetic construct
AAWDFGTTGWFNI

SEQ ID NO: 48911 - protein, 10 aa, synthetic construct
AAWDFGWFNI

SEQ ID NO: 48912 - protein, 10 aa, synthetic construct
AAWDFGWVQI

SEQ ID NO: 48913 - protein, 11 aa, synthetic construct
AAWDFHYYKKL

SEQ ID NO: 48914 - protein, 9 aa, synthetic construct
AAWDFLFKI

SEQ ID NO: 48915 - protein, 11 aa, synthetic construct
AAWDFNGWFKI

SEQ ID NO: 48916 - protein, 12 aa, synthetic construct
AAWDFNTGWLKI

SEQ ID NO: 48917 - protein, 11 aa, synthetic construct
AAWDFPANKKL

SEQ ID NO: 48918 - protein, 11 aa, synthetic construct
AAWDFPCWFKI

SEQ ID NO: 48919 - protein, 14 aa, synthetic construct
AAWDFPFTKGWFKI

SEQ ID NO: 48920 - protein, 11 aa, synthetic construct
AAWDFPGWFKK

SEQ ID NO: 48921 - protein, 11 aa, synthetic construct
AAWDFPGWLKI

SEQ ID NO: 48922 - protein, 14 aa, synthetic construct
AAWDFPHTTGWFKI

SEQ ID NO: 48923 - protein, 11 aa, synthetic construct
AAWDFPSNKEL

SEQ ID NO: 48924 - protein, 11 aa, synthetic construct
AAWDFPSNKKI

SEQ ID NO: 48925 - protein, 20 aa, synthetic construct
AAWDFGRGWLDEFTKRTEKK

SEQ ID NO: 48926 - protein, 10 aa, synthetic construct
AAWDFGRFKI

SEQ ID NO: 48927 - protein, 14 aa, synthetic construct
AAWDFGPSTGWFKI

SEQ ID NO: 48928 - protein, 9 aa, synthetic construct
AAWDEYKIL

SEQ ID NO: 48929 - protein, 13 aa, synthetic construct
AAWDEDTTGLLKI

SEQ ID NO: 48930 - protein, 13 aa, synthetic construct
AAWDEETPGWFKI

SEQ ID NO: 48931 - protein, 13 aa, synthetic construct
AAWDEETTGLFKI

SEQ ID NO: 48932 - protein, 13 aa, synthetic construct
AAWDEETTGRFKI

SEQ ID NO: 48933 - protein, 13 aa, synthetic construct
AAWDEETTGWFQI

SEQ ID NO: 48934 - protein, 13 aa, synthetic construct
AAWDEGTTGWFKI

SEQ ID NO: 48935 - protein, 14 aa, synthetic construct
AAWDERDTTGWLKI

SEQ ID NO: 48936 - protein, 14 aa, synthetic construct
AAWDERDTTGWSKI

SEQ ID NO: 48937 - protein, 9 aa, synthetic construct
AAWDEYNKL

SEQ ID NO: 48938 - protein, 12 aa, synthetic construct
AAWDFGPGWVMI

SEQ ID NO: 48939 - protein, 9 aa, synthetic construct
AAWDEYRKL

SEQ ID NO: 48940 - protein, 11 aa, synthetic construct
AAWDFAGWVKI

SEQ ID NO: 48941 - protein, 12 aa, synthetic construct
AAWDFATGWFKL

SEQ ID NO: 48942 - protein, 12 aa, synthetic construct
AAWDFATGWFKM

SEQ ID NO: 48943 - protein, 12 aa, synthetic construct
AAWDFATGWFKT

SEQ ID NO: 48944 - protein, 12 aa, synthetic construct
AAWDFATGWYKI

SEQ ID NO: 48945 - protein, 12 aa, synthetic construct
AAWDFATVWFKI

SEQ ID NO: 48946 - protein, 12 aa, synthetic construct
AAWDFGPGWFKI

SEQ ID NO: 48947 - protein, 10 aa, synthetic construct
AAWDLGDKKL

SEQ ID NO: 48948 - protein, 14 aa, synthetic construct
AAWDLGIATGWFMI

SEQ ID NO: 48949 - protein, 13 aa, synthetic construct
AAWDSEAPGWVKR

SEQ ID NO: 48950 - protein, 5 aa, synthetic construct
AAWDQ

SEQ ID NO: 48951 - protein, 13 aa, synthetic construct
AAWDQGTTGWFKI

SEQ ID NO: 48952 - protein, 13 aa, synthetic construct
AAWDQHTTGWFKI

SEQ ID NO: 48953 - protein, 13 aa, synthetic construct
AAWDQQNTGWFKI

SEQ ID NO: 48954 - protein, 12 aa, synthetic construct
AAWDQTTGGFKI

SEQ ID NO: 48955 - protein, 13 aa, synthetic construct
AAWDQYTTGCFKI

SEQ ID NO: 48956 - protein, 13 aa, synthetic construct
AAWDQYTTGLFKI

SEQ ID NO: 48957 - protein, 13 aa, synthetic construct
AAWDQYTTGRFKI

SEQ ID NO: 48958 - protein, 13 aa, synthetic construct
AAWDQYTTGWFEI

SEQ ID NO: 48959 - protein, 11 aa, synthetic construct
AAWDRAGWFKI

SEQ ID NO: 48960 - protein, 8 aa, synthetic construct
AAWDRATG

SEQ ID NO: 48961 - protein, 12 aa, synthetic construct
AAWDRATGGFKI

SEQ ID NO: 48962 - protein, 12 aa, synthetic construct
AAWDRATGRFKV

SEQ ID NO: 48963 - protein, 12 aa, synthetic construct
AAWDRATGWFEI

SEQ ID NO: 48964 - protein, 12 aa, synthetic construct
AAWDRATGWIKI

SEQ ID NO: 48965 - protein, 12 aa, synthetic construct
AAWDRATGWYKI

SEQ ID NO: 48966 - protein, 9 aa, synthetic construct
AAWDRDKKL

SEQ ID NO: 48967 - protein, 16 aa, synthetic construct
AAWDREMELFGIVKKL

SEQ ID NO: 48968 - protein, 12 aa, synthetic construct
AAWDRGCGWLKI

SEQ ID NO: 48969 - protein, 11 aa, synthetic construct
AAWDRGGWFKI

SEQ ID NO: 48970 - protein, 13 aa, synthetic construct
AAWDQFTTGWFKI

SEQ ID NO: 48971 - protein, 10 aa, synthetic construct
AAWDPYYKKL

SEQ ID NO: 48972 - protein, 8 aa, synthetic construct
AAWDRGQI

SEQ ID NO: 48973 - protein, 13 aa, synthetic construct
AAWDPYTTGWVKI

SEQ ID NO: 48974 - protein, 10 aa, synthetic construct
AAWDPSWFKM

SEQ ID NO: 48975 - protein, 13 aa, synthetic construct
AAWDPTGAGWFKI

SEQ ID NO: 48976 - protein, 11 aa, synthetic construct
AAWDPTGLFNI

SEQ ID NO: 48977 - protein, 13 aa, synthetic construct
AAWDPTGPGWLKI

SEQ ID NO: 48978 - protein, 11 aa, synthetic construct
AAWDPTGWFEL

SEQ ID NO: 48979 - protein, 11 aa, synthetic construct
AAWDPTGWFNI

SEQ ID NO: 48980 - protein, 10 aa, synthetic construct
AAWDPTGWFR

SEQ ID NO: 48981 - protein, 11 aa, synthetic construct
AAWDPTGWVKI

SEQ ID NO: 48982 - protein, 10 aa, synthetic construct
AAWDPTLLKI

SEQ ID NO: 48983 - protein, 11 aa, synthetic construct
AAWDPTRWFKI

SEQ ID NO: 48984 - protein, 12 aa, synthetic construct
AAWDPTTGGFKI

SEQ ID NO: 48985 - protein, 12 aa, synthetic construct
AAWDPTTGWLKI

SEQ ID NO: 48986 - protein, 13 aa, synthetic construct
AAWDPYSTGWFKI

SEQ ID NO: 48987 - protein, 13 aa, synthetic construct
AAWDPYTNGWFKI

SEQ ID NO: 48988 - protein, 13 aa, synthetic construct
AAWDPYTPGWFKI

SEQ ID NO: 48989 - protein, 13 aa, synthetic construct
AAWDPYTSGWFKI

SEQ ID NO: 48990 - protein, 13 aa, synthetic construct
AAWDPYTTGLFKI

SEQ ID NO: 48991 - protein, 13 aa, synthetic construct
AAWDPYTTGWFKV

SEQ ID NO: 48992 - protein, 13 aa, synthetic construct
AAWDPYTTGWSKI

SEQ ID NO: 48993 - protein, 11 aa, synthetic construct
AAWDRGGWFKL

SEQ ID NO: 48994 - protein, 12 aa, synthetic construct
AAWDRGSGWFKR

SEQ ID NO: 48995 - protein, 14 aa, synthetic construct
AAWDLGIATGWFNI

SEQ ID NO: 48996 - protein, 10 aa, synthetic construct
AAWDRTTGWF

SEQ ID NO: 48997 - protein, 12 aa, synthetic construct
AAWDRTTGWFRI

SEQ ID NO: 48998 - protein, 12 aa, synthetic construct
AAWDRTTGWFTI

SEQ ID NO: 48999 - protein, 12 aa, synthetic construct
AAWDRTTGWVKI

SEQ ID NO: 49000 - protein, 14 aa, synthetic construct
AAWDRVDTTGWFKI

SEQ ID NO: 49001 - protein, 13 aa, synthetic construct
AAWDRVPTGWFKI

SEQ ID NO: 49002 - protein, 12 aa, synthetic construct
AAWDRVTGMFNI

SEQ ID NO: 49003 - protein, 9 aa, synthetic construct
AAWDRWFKI

SEQ ID NO: 49004 - protein, 8 aa, synthetic construct
AAWDRWKI

SEQ ID NO: 49005 - protein, 9 aa, synthetic construct
AAWDRYKKH

SEQ ID NO: 49006 - protein, 13 aa, synthetic construct
AAWDRYTIGWFKI

SEQ ID NO: 49007 - protein, 13 aa, synthetic construct
AAWDRYTPGWFKI

SEQ ID NO: 49008 - protein, 13 aa, synthetic construct
AAWDRYTTGLFKI

SEQ ID NO: 49009 - protein, 12 aa, synthetic construct
AAWDSATGGFKI

SEQ ID NO: 49010 - protein, 12 aa, synthetic construct
AAWDSATGWFEI

SEQ ID NO: 49011 - protein, 12 aa, synthetic construct
AAWDSATGWFNI

SEQ ID NO: 49012 - protein, 13 aa, synthetic construct
AAWDSCTTGWFKI

SEQ ID NO: 49013 - protein, 13 aa, synthetic construct
AAWDSDTPGWFKI

SEQ ID NO: 49014 - protein, 13 aa, synthetic construct
AAWDSDTTGWVKI

SEQ ID NO: 49015 - protein, 10 aa, synthetic construct
AAWDSDYKKP

SEQ ID NO: 49016 - protein, 12 aa, synthetic construct
AAWDRTTGWFNT

SEQ ID NO: 49017 - protein, 12 aa, synthetic construct
AAWDRTPGWLKI

SEQ ID NO: 49018 - protein, 12 aa, synthetic construct
AAWDRGSGWFRI

SEQ ID NO: 49019 - protein, 12 aa, synthetic construct
AAWDRTPGWFKI

SEQ ID NO: 49020 - protein, 12 aa, synthetic construct
AAWDRGSGWLKI

SEQ ID NO: 49021 - protein, 12 aa, synthetic construct
AAWDRGTCWFKI

SEQ ID NO: 49022 - protein, 12 aa, synthetic construct
AAWDRGTCWLNI

SEQ ID NO: 49023 - protein, 12 aa, synthetic construct
AAWDRGTGLFKI

SEQ ID NO: 49024 - protein, 12 aa, synthetic construct
AAWDRGTGWFKT

SEQ ID NO: 49025 - protein, 12 aa, synthetic construct
AAWDRGTGWLKI

SEQ ID NO: 49026 - protein, 12 aa, synthetic construct
AAWDRGTGWVKI

SEQ ID NO: 49027 - protein, 12 aa, synthetic construct
AAWDRPTGWFKI

SEQ ID NO: 49028 - protein, 13 aa, synthetic construct
AAWDRRNTGWFKI

SEQ ID NO: 49029 - protein, 13 aa, synthetic construct
AAWDRRPTGWFKI

SEQ ID NO: 49030 - protein, 13 aa, synthetic construct
AAWDRRTNGWLKI

SEQ ID NO: 49031 - protein, 13 aa, synthetic construct
AAWDRRTTGGFQL

SEQ ID NO: 49032 - protein, 13 aa, synthetic construct
AAWDRRTTGWCKI

SEQ ID NO: 49033 - protein, 13 aa, synthetic construct
AAWDRRTTGWFNI

SEQ ID NO: 49034 - protein, 13 aa, synthetic construct
AAWDRRTTGWLKI

SEQ ID NO: 49035 - protein, 13 aa, synthetic construct
AAWDRRTTGWSKI

SEQ ID NO: 49036 - protein, 13 aa, synthetic construct
AAWDRRTTGWVKI

SEQ ID NO: 49037 - protein, 12 aa, synthetic construct
AAWDRTAGWFKI

SEQ ID NO: 49038 - protein, 11 aa, synthetic construct
AAWDRTGWFKI

SEQ ID NO: 49039 - protein, 15 aa, synthetic construct
AAWDPSLYTTGWVKI

SEQ ID NO: 49040 - protein, 15 aa, synthetic construct
AAWDPSLYTTGWSKI

SEQ ID NO: 49041 - protein, 15 aa, synthetic construct
AAWDPSLYTTGWLKI

SEQ ID NO: 49042 - protein, 12 aa, synthetic construct
AAWDLPTGGFKI

SEQ ID NO: 49043 - protein, 11 aa, synthetic construct
AAWDLRYYKKL

SEQ ID NO: 49044 - protein, 12 aa, synthetic construct
AAWDLSTGWIKI

SEQ ID NO: 49045 - protein, 12 aa, synthetic construct
AAWDLSTGWSKI

SEQ ID NO: 49046 - protein, 11 aa, synthetic construct
AAWDLTGWLKI

SEQ ID NO: 49047 - protein, 12 aa, synthetic construct
AAWDLTTGWLKK

SEQ ID NO: 49048 - protein, 10 aa, synthetic construct
AAWDLVCKKL

SEQ ID NO: 49049 - protein, 13 aa, synthetic construct
AAWDLVTTGLFKI

SEQ ID NO: 49050 - protein, 10 aa, synthetic construct
AAWDLVYKKI

SEQ ID NO: 49051 - protein, 10 aa, synthetic construct
AAWDLVYNKL

SEQ ID NO: 49052 - protein, 10 aa, synthetic construct
AAWDLWYKKL

SEQ ID NO: 49053 - protein, 13 aa, synthetic construct
AAWDLYTTGWFKR

SEQ ID NO: 49054 - protein, 13 aa, synthetic construct
AAWDLYTTGWFNI

SEQ ID NO: 49055 - protein, 13 aa, synthetic construct
AAWDLYTTGWFRI

SEQ ID NO: 49056 - protein, 13 aa, synthetic construct
AAWDLYTTGWSKI

SEQ ID NO: 49057 - protein, 12 aa, synthetic construct
AAWDMGTGWFKI

SEQ ID NO: 49058 - protein, 10 aa, synthetic construct
AAWDMGYKKI

SEQ ID NO: 49059 - protein, 12 aa, synthetic construct
AAWDMTTGWFKI

SEQ ID NO: 49060 - protein, 13 aa, synthetic construct
AAWDNGTTGWFNI

SEQ ID NO: 49061 - protein, 12 aa, synthetic construct
AAWDNITGWFKI

SEQ ID NO: 49062 - protein, 12 aa, synthetic construct
AAWDLPTGWLKI

SEQ ID NO: 49063 - protein, 14 aa, synthetic construct
AAWDLPHTTGWSKI

SEQ ID NO: 49064 - protein, 15 aa, synthetic construct
AAWDPSLYTTGWFKR

SEQ ID NO: 49065 - protein, 14 aa, synthetic construct
AAWDLPHTTGWFNI

SEQ ID NO: 49066 - protein, 14 aa, synthetic construct
AAWDLGIGTGWFKI

SEQ ID NO: 49067 - protein, 14 aa, synthetic construct
AAWDLGNNTGWFKI

SEQ ID NO: 49068 - protein, 14 aa, synthetic construct
AAWDLGNTTGWFKK

SEQ ID NO: 49069 - protein, 14 aa, synthetic construct
AAWDLGNTTGWFKV

SEQ ID NO: 49070 - protein, 14 aa, synthetic construct
AAWDLGNTTGWLEI

SEQ ID NO: 49071 - protein, 12 aa, synthetic construct
AAWDLGPGWFRI

SEQ ID NO: 49072 - protein, 12 aa, synthetic construct
AAWDLGPGWLKI

SEQ ID NO: 49073 - protein, 12 aa, synthetic construct
AAWDLGSGWFKI

SEQ ID NO: 49074 - protein, 14 aa, synthetic construct
AAWDLGSTTGWFKI

SEQ ID NO: 49075 - protein, 12 aa, synthetic construct
AAWDLGTDWFKI

SEQ ID NO: 49076 - protein, 12 aa, synthetic construct
AAWDLGTGRFKI

SEQ ID NO: 49077 - protein, 12 aa, synthetic construct
AAWDLGTGWLNI

SEQ ID NO: 49078 - protein, 13 aa, synthetic construct
AAWDLGTTGWCKI

SEQ ID NO: 49079 - protein, 13 aa, synthetic construct
AAWDLGTTGWFKM

SEQ ID NO: 49080 - protein, 13 aa, synthetic construct
AAWDLGTTGWLKI

SEQ ID NO: 49081 - protein, 10 aa, synthetic construct
AAWDLGWFKI

SEQ ID NO: 49082 - protein, 12 aa, synthetic construct
AAWDLHTGWFKI

SEQ ID NO: 49083 - protein, 11 aa, synthetic construct
AAWDLPHTTGW

SEQ ID NO: 49084 - protein, 14 aa, synthetic construct
AAWDLPHTTGWFKK

SEQ ID NO: 49085 - protein, 11 aa, synthetic construct
AAWDNKGLFKI

SEQ ID NO: 49086 - protein, 7 aa, synthetic construct
AAWDNKL

SEQ ID NO: 49087 - protein, 12 aa, synthetic construct
AAWDNNTAWFKI

SEQ ID NO: 49088 - protein, 12 aa, synthetic construct
AAWDNNTGWLKI

SEQ ID NO: 49089 - protein, 14 aa, synthetic construct
AAWDPLYNTGWFKI

SEQ ID NO: 49090 - protein, 14 aa, synthetic construct
AAWDPLYTAGWFKI

SEQ ID NO: 49091 - protein, 14 aa, synthetic construct
AAWDPLYTNGWFKI

SEQ ID NO: 49092 - protein, 14 aa, synthetic construct
AAWDPLYTTGLFKI

SEQ ID NO: 49093 - protein, 14 aa, synthetic construct
AAWDPLYTTGRFKI

SEQ ID NO: 49094 - protein, 14 aa, synthetic construct
AAWDPLYTTGWFKV

SEQ ID NO: 49095 - protein, 14 aa, synthetic construct
AAWDPLYTTGWFNI

SEQ ID NO: 49096 - protein, 14 aa, synthetic construct
AAWDPLYTTGWFRI

SEQ ID NO: 49097 - protein, 14 aa, synthetic construct
AAWDPLYTTGWLKI

SEQ ID NO: 49098 - protein, 11 aa, synthetic construct
AAWDPNYYKKL

SEQ ID NO: 49099 - protein, 14 aa, synthetic construct
AAWDPPHTTGWFKI

SEQ ID NO: 49100 - protein, 12 aa, synthetic construct
AAWDPPNYYKKL

SEQ ID NO: 49101 - protein, 14 aa, synthetic construct
AAWDPRYTTGWFRI

SEQ ID NO: 49102 - protein, 13 aa, synthetic construct
AAWDPSGTGWFKI

SEQ ID NO: 49103 - protein, 11 aa, synthetic construct
AAWDPSGWFKI

SEQ ID NO: 49104 - protein, 14 aa, synthetic construct
AAWDPSHTTGWLKI

SEQ ID NO: 49105 - protein, 10 aa, synthetic construct
AAWDPSLLKI

SEQ ID NO: 49106 - protein, 15 aa, synthetic construct
AAWDPSLYTPGWFKI

SEQ ID NO: 49107 - protein, 15 aa, synthetic construct
AAWDPSLYTTGLLKI

SEQ ID NO: 49108 - protein, 12 aa, synthetic construct
AAWDPLNHYKKL

SEQ ID NO: 49109 - protein, 11 aa, synthetic construct
AAWDPLGWFKI

SEQ ID NO: 49110 - protein, 13 aa, synthetic construct
AAWDPHATGWFKI

SEQ ID NO: 49111 - protein, 14 aa, synthetic construct
AAWDPGDTAGWFKI

SEQ ID NO: 49112 - protein, 11 aa, synthetic construct
AAWDNPGWLKI

SEQ ID NO: 49113 - protein, 11 aa, synthetic construct
AAWDNTGWFKL

SEQ ID NO: 49114 - protein, 12 aa, synthetic construct
AAWDNTTAWFEI

SEQ ID NO: 49115 - protein, 12 aa, synthetic construct
AAWDNTTGWCKI

SEQ ID NO: 49116 - protein, 12 aa, synthetic construct
AAWDNTTSWFKI

SEQ ID NO: 49117 - protein, 10 aa, synthetic construct
AAWDNYDKYI

SEQ ID NO: 49118 - protein, 13 aa, synthetic construct
AAWDPCTTGWFKI

SEQ ID NO: 49119 - protein, 11 aa, synthetic construct
AAWDPDYNKKL

SEQ ID NO: 49120 - protein, 14 aa, synthetic construct
AAWDPGDTTCWFKI

SEQ ID NO: 49121 - protein, 10 aa, synthetic construct
AAWDPGWFKI

SEQ ID NO: 49122 - protein, 14 aa, synthetic construct
AAWDPGDTTGLFKI

SEQ ID NO: 49123 - protein, 14 aa, synthetic construct
AAWDPGDTTGRFKI

SEQ ID NO: 49124 - protein, 14 aa, synthetic construct
AAWDPGDTTGWFRI

SEQ ID NO: 49125 - protein, 14 aa, synthetic construct
AAWDPGDTTGWLKI

SEQ ID NO: 49126 - protein, 14 aa, synthetic construct
AAWDPGDTTGWLNI

SEQ ID NO: 49127 - protein, 14 aa, synthetic construct
AAWDPGDTTGWVQI

SEQ ID NO: 49128 - protein, 14 aa, synthetic construct
AAWDPGNTTGWFKI

SEQ ID NO: 49129 - protein, 12 aa, synthetic construct
AAWDPGTGWFKI

SEQ ID NO: 49130 - protein, 8 aa, synthetic construct
YEWDMGQI

SEQ ID NO: 49131 - protein, 13 aa, synthetic construct
AAWDSHTTGWFKI

SEQ ID NO: 49132 - protein, 12 aa, synthetic construct
AAWDYTTGWFKI

SEQ ID NO: 49133 - protein, 9 aa, synthetic construct
AAWWGWFKI

SEQ ID NO: 49134 - protein, 11 aa, synthetic construct
AAWDSTGWFKI

SEQ ID NO: 49135 - protein, 13 aa, synthetic construct
AAWSPRATGWFKI

SEQ ID NO: 49136 - protein, 13 aa, synthetic construct
AAWDQHTTGWFKI

SEQ ID NO: 49137 - protein, 12 aa, synthetic construct
AAWDFATGWFKI

SEQ ID NO: 49138 - protein, 14 aa, synthetic construct
AAWDFTHTTGWFKI

SEQ ID NO: 49139 - protein, 14 aa, synthetic construct
AAWDYRGATGWFKI

SEQ ID NO: 49140 - protein, 9 aa, synthetic construct
ASTTGWFKI

SEQ ID NO: 49141 - protein, 12 aa, synthetic construct
AAWVDTTGWFKI

SEQ ID NO: 49142 - protein, 9 aa, synthetic construct
AAWDYYKKL

SEQ ID NO: 49143 - protein, 11 aa, synthetic construct
AAWDCSGWFKI

SEQ ID NO: 49144 - protein, 12 aa, synthetic construct
AAWADTTGWFKI

SEQ ID NO: 49145 - protein, 11 aa, synthetic construct
AAWDCTGWFKI

SEQ ID NO: 49146 - protein, 11 aa, synthetic construct
AAWDTTGWFKI

SEQ ID NO: 49147 - protein, 12 aa, synthetic construct
AAWDYTTGWLKI

SEQ ID NO: 49148 - protein, 14 aa, synthetic construct
AAWDYEETTGWFKI

SEQ ID NO: 49149 - protein, 9 aa, synthetic construct
AAWGGWFKI

SEQ ID NO: 49150 - protein, 12 aa, synthetic construct
AAWAYTTGWFKI

SEQ ID NO: 49151 - protein, 13 aa, synthetic construct
AAWDSHTTGWLKI

SEQ ID NO: 49152 - protein, 13 aa, synthetic construct
AAWDSHTTGLFKI

SEQ ID NO: 49153 - protein, 14 aa, synthetic construct
AAWDYRGAPGWFKI

SEQ ID NO: 49154 - protein, 13 aa, synthetic construct
AAWASHTTGWFKI

SEQ ID NO: 49155 - protein, 13 aa, synthetic construct
AAWSPRAPGWFKI

SEQ ID NO: 49156 - protein, 14 aa, synthetic construct
AAWEYRGATGWFKI

SEQ ID NO: 49157 - protein, 13 aa, synthetic construct
AALDSHTTGWFKI

SEQ ID NO: 49158 - protein, 12 aa, synthetic construct
AAWGYTTGWFKI

SEQ ID NO: 49159 - protein, 12 aa, synthetic construct
AAWDYNTGWFKI

SEQ ID NO: 49160 - protein, 13 aa, synthetic construct
AAWDYHTTGWFKI

SEQ ID NO: 49161 - protein, 12 aa, synthetic construct
AAWDFATGWLKI

SEQ ID NO: 49162 - protein, 13 aa, synthetic construct
AAGDSHTTGWFKI

SEQ ID NO: 49163 - protein, 9 aa, synthetic construct
AAWWGWLKI

SEQ ID NO: 49164 - protein, 12 aa, synthetic construct
AALDYTTGWFKI

SEQ ID NO: 49165 - protein, 11 aa, synthetic construct
AAWDSTGWLKI

SEQ ID NO: 49166 - protein, 13 aa, synthetic construct
AAWDSHTTGWFKV

SEQ ID NO: 49167 - protein, 12 aa, synthetic construct
AAGDFATGWFKI

SEQ ID NO: 49168 - protein, 14 aa, synthetic construct
AAWDLTHTTGWFKI

SEQ ID NO: 49169 - protein, 9 aa, synthetic construct
AAWDYHKKL

SEQ ID NO: 49170 - protein, 13 aa, synthetic construct
AVWDSHTTGWFKI

SEQ ID NO: 49171 - protein, 13 aa, synthetic construct
AAWDSHTTGWFNI

SEQ ID NO: 49172 - protein, 9 aa, synthetic construct
AAGWGWFKI

SEQ ID NO: 49173 - protein, 11 aa, synthetic construct
AALDSTGWFKI

SEQ ID NO: 49174 - protein, 14 aa, synthetic construct
AAWDYIGATGWFKI

SEQ ID NO: 49175 - protein, 13 aa, synthetic construct
AAWDSHNTGWFKI

SEQ ID NO: 49176 - protein, 13 aa, synthetic construct
AAWYSHTTGWFKI

SEQ ID NO: 49177 - protein, 13 aa, synthetic construct
AAWDSHTPGWFKI

SEQ ID NO: 49178 - protein, 13 aa, synthetic construct
AAWDSQTTGWFKI

SEQ ID NO: 49179 - protein, 14 aa, synthetic construct
AAWAYRGATGWFKI

SEQ ID NO: 49180 - protein, 12 aa, synthetic construct
AAWDYTTGWFEI

SEQ ID NO: 49181 - protein, 13 aa, synthetic construct
AAWDQHTTGLFKI

SEQ ID NO: 49182 - protein, 12 aa, synthetic construct
AAGDYTTGWFKI

SEQ ID NO: 49183 - protein, 14 aa, synthetic construct
AAWDFTHTTGWLKI

SEQ ID NO: 49184 - protein, 13 aa, synthetic construct
AARDSHTTGWFKI

SEQ ID NO: 49185 - protein, 12 aa, synthetic construct
AAWEYTTGWFKI

SEQ ID NO: 49186 - protein, 12 aa, synthetic construct
AAWDYTTGLFKI

SEQ ID NO: 49187 - protein, 12 aa, synthetic construct
LRGILIPLVGSR

SEQ ID NO: 49188 - protein, 11 aa, synthetic construct
AAWDYTGWFKI

SEQ ID NO: 49189 - protein, 9 aa, synthetic construct
ASNTGWFKI

SEQ ID NO: 49190 - protein, 13 aa, synthetic construct
AAWDSHTTCWFKI

SEQ ID NO: 49191 - protein, 12 aa, synthetic construct
AAWVDTTGWLKI

SEQ ID NO: 49192 - protein, 13 aa, synthetic construct
AALDQHTTGWFKI

SEQ ID NO: 49193 - protein, 9 aa, synthetic construct
ASTTGWLKI

SEQ ID NO: 49194 - protein, 14 aa, synthetic construct
AAWDYRGATGWLKI

SEQ ID NO: 49195 - protein, 13 aa, synthetic construct
AAWDPHTTGWFKI

SEQ ID NO: 49196 - protein, 13 aa, synthetic construct
AAWGSHTTGWFKI

SEQ ID NO: 49197 - protein, 13 aa, synthetic construct
AAWESHTTGWFKI

SEQ ID NO: 49198 - protein, 14 aa, synthetic construct
AAWDYRGATGWFNI

SEQ ID NO: 49199 - protein, 13 aa, synthetic construct
AACDSHTTGWFKI

SEQ ID NO: 49200 - protein, 12 aa, synthetic construct
AAWDYTTGWFKV

SEQ ID NO: 49201 - protein, 10 aa, synthetic construct
LRGIPLVGSR

SEQ ID NO: 49202 - protein, 13 aa, synthetic construct
AAWDSHTAGWFKI

SEQ ID NO: 49203 - protein, 11 aa, synthetic construct
AAWDPTGWFKI

SEQ ID NO: 49204 - protein, 13 aa, synthetic construct
AAWDSHTTGWFEI

SEQ ID NO: 49205 - protein, 12 aa, synthetic construct
AAWDYTTSWFKI

SEQ ID NO: 49206 - protein, 13 aa, synthetic construct
AAWDSRTTGWFKI

SEQ ID NO: 49207 - protein, 14 aa, synthetic construct
AAWDFTHTTGWFNI

SEQ ID NO: 49208 - protein, 12 aa, synthetic construct
AAWDFATGWFNI

SEQ ID NO: 49209 - protein, 13 aa, synthetic construct
AAGDQHTTGWFKI

SEQ ID NO: 49210 - protein, 13 aa, synthetic construct
AAWDSHATGWFKI

SEQ ID NO: 49211 - protein, 14 aa, synthetic construct
AAFWQWNNTGWFKI

SEQ ID NO: 49212 - protein, 12 aa, synthetic construct
AAWVDTTGWFNI

SEQ ID NO: 49213 - protein, 9 aa, synthetic construct
ASTTGLFKI

SEQ ID NO: 49214 - protein, 13 aa, synthetic construct
AACDQHTTGWFKI

SEQ ID NO: 49215 - protein, 9 aa, synthetic construct
AAWWGWFKL

SEQ ID NO: 49216 - protein, 14 aa, synthetic construct
AAGDFTHTTGWFKI

SEQ ID NO: 49217 - protein, 12 aa, synthetic construct
AAWDYTTCWFKI

SEQ ID NO: 49218 - protein, 13 aa, synthetic construct
AAWDSHTNGWFKI

SEQ ID NO: 49219 - protein, 14 aa, synthetic construct
AAWGYRGATGWFKI

SEQ ID NO: 49220 - protein, 9 aa, synthetic construct
AAWWGLFKI

SEQ ID NO: 49221 - protein, 13 aa, synthetic construct
AAWDSHTTGRFKI

SEQ ID NO: 49222 - protein, 12 aa, synthetic construct
AAWDYATGWFKI

SEQ ID NO: 49223 - protein, 11 aa, synthetic construct
AAWDSTGWSKI

SEQ ID NO: 49224 - protein, 12 aa, synthetic construct
AAWDYTTGWFNI

SEQ ID NO: 49225 - protein, 13 aa, synthetic construct
AAWDQHTTGWLKI

SEQ ID NO: 49226 - protein, 9 aa, synthetic construct
AAWDYYKKI

SEQ ID NO: 49227 - protein, 13 aa, synthetic construct
AAWSPRATGRFKI

SEQ ID NO: 49228 - protein, 13 aa, synthetic construct
AAWDSHTTGWVKI

SEQ ID NO: 49229 - protein, 9 aa, synthetic construct
AAWWGWFEI

SEQ ID NO: 49230 - protein, 13 aa, synthetic construct
AAWGQHTTGWFKI

SEQ ID NO: 49231 - protein, 14 aa, synthetic construct
AALDFTHTTGWFKI

SEQ ID NO: 49232 - protein, 14 aa, synthetic construct
AAWDFTHTTGLFKI

SEQ ID NO: 49233 - protein, 13 aa, synthetic construct
AAWSPRATGLFKI

SEQ ID NO: 49234 - protein, 9 aa, synthetic construct
AAWPGWFKI

SEQ ID NO: 49235 - protein, 13 aa, synthetic construct
AAWDQQTTGWFKI

SEQ ID NO: 49236 - protein, 13 aa, synthetic construct
AAWDSHTTGWSKI

SEQ ID NO: 49237 - protein, 11 aa, synthetic construct
AAWDSTGWFNI

SEQ ID NO: 49238 - protein, 12 aa, synthetic construct
AAWDFSTGWFKI

SEQ ID NO: 49239 - protein, 12 aa, synthetic construct
AAWAFATGWFKI

SEQ ID NO: 49240 - protein, 12 aa, synthetic construct
LRGTNIPLVGSR

SEQ ID NO: 49241 - protein, 13 aa, synthetic construct
AAWDSHTTGWFTI

SEQ ID NO: 49242 - protein, 12 aa, synthetic construct
AAWIIIAGWFKI

SEQ ID NO: 49243 - protein, 12 aa, synthetic construct
AACDYTTGWFKI

SEQ ID NO: 49244 - protein, 11 aa, synthetic construct
AAWESTGWFKI

SEQ ID NO: 49245 - protein, 13 aa, synthetic construct
AAWDQHNTGWFKI

SEQ ID NO: 49246 - protein, 12 aa, synthetic construct
AALDFATGWFKI

SEQ ID NO: 49247 - protein, 12 aa, synthetic construct
AAWVDTTGWSKI

SEQ ID NO: 49248 - protein, 13 aa, synthetic construct
AAWSPRATGWLKI

SEQ ID NO: 49249 - protein, 9 aa, synthetic construct
AAWLGWFKI

SEQ ID NO: 49250 - protein, 11 aa, synthetic construct
LRGPIPLVGSR

SEQ ID NO: 49251 - protein, 13 aa, synthetic construct
ASWDSHTTGWFKI

SEQ ID NO: 49252 - protein, 12 aa, synthetic construct
SAWDYTTGWFKI

SEQ ID NO: 49253 - protein, 9 aa, synthetic construct
AAGGGWFKI

SEQ ID NO: 49254 - protein, 13 aa, synthetic construct
AAWDQHTTCWFKI

SEQ ID NO: 49255 - protein, 13 aa, synthetic construct
AAWDSHTTGWFRI

SEQ ID NO: 49256 - protein, 13 aa, synthetic construct
AAWVSHTTGWFKI

SEQ ID NO: 49257 - protein, 11 aa, synthetic construct
AAWDSTGLFKI

SEQ ID NO: 49258 - protein, 12 aa, synthetic construct
AAWDYTPGWFKI

SEQ ID NO: 49259 - protein, 14 aa, synthetic construct
AAWDFTHTTGWSKI

SEQ ID NO: 49260 - protein, 9 aa, synthetic construct
SAWWGWFKI

SEQ ID NO: 49261 - protein, 13 aa, synthetic construct
AAWDQHTTGRFKI

SEQ ID NO: 49262 - protein, 11 aa, synthetic construct
AAGDSTGWFKI

SEQ ID NO: 49263 - protein, 12 aa, synthetic construct
AAWDYTTGWFRI

SEQ ID NO: 49264 - protein, 13 aa, synthetic construct
AAWDCHTTGWFKI

SEQ ID NO: 49265 - protein, 9 aa, synthetic construct
AAWWGWFKV

SEQ ID NO: 49266 - protein, 12 aa, synthetic construct
AAWDYTTGWSKI

SEQ ID NO: 49267 - protein, 11 aa, synthetic construct
AAWDSTCWFKI

SEQ ID NO: 49268 - protein, 9 aa, synthetic construct
AAWDSHTTG

SEQ ID NO: 49269 - protein, 13 aa, synthetic construct
AAWDSHTTGWFKM

SEQ ID NO: 49270 - protein, 12 aa, synthetic construct
AALVDTTGWFKI

SEQ ID NO: 49271 - protein, 9 aa, synthetic construct
AAWWGWFNI

SEQ ID NO: 49272 - protein, 14 aa, synthetic construct
AACDFTHTTGWFKI

SEQ ID NO: 49273 - protein, 13 aa, synthetic construct
AAWSPLATGWFKI

SEQ ID NO: 49274 - protein, 13 aa, synthetic construct
LRGISLIPLVGSR

SEQ ID NO: 49275 - protein, 12 aa, synthetic construct
AACDFATGWFKI

SEQ ID NO: 49276 - protein, 9 aa, synthetic construct
AAWWCWFKI

SEQ ID NO: 49277 - protein, 12 aa, synthetic construct
ATWDYTTGWFKI

SEQ ID NO: 49278 - protein, 14 aa, synthetic construct
AALDYRGATGWFKI

SEQ ID NO: 49279 - protein, 11 aa, synthetic construct
AAWDSPGWFKI

SEQ ID NO: 49280 - protein, 9 aa, synthetic construct
AAWWGWSKI

SEQ ID NO: 49281 - protein, 14 aa, synthetic construct
AAWDYRGATGWFRI

SEQ ID NO: 49282 - protein, 11 aa, synthetic construct
AAWKGTGWFKI

SEQ ID NO: 49283 - protein, 9 aa, synthetic construct
AAGDYYKKL

SEQ ID NO: 49284 - protein, 12 aa, synthetic construct
AAWEFATGWFKI

SEQ ID NO: 49285 - protein, 13 aa, synthetic construct
AAWPPRATGWFKI

SEQ ID NO: 49286 - protein, 13 aa, synthetic construct
AAWDKHTTGWFKI

SEQ ID NO: 49287 - protein, 13 aa, synthetic construct
AAWDQHTTGWFRI

SEQ ID NO: 49288 - protein, 13 aa, synthetic construct
LRGIIEEPLVGSR

SEQ ID NO: 49289 - protein, 11 aa, synthetic construct
AAWDSTGWFEI

SEQ ID NO: 49290 - protein, 13 aa, synthetic construct
AARDQHTTGWFKI

SEQ ID NO: 49291 - protein, 13 aa, synthetic construct
AAWDQHTTGWFKV

SEQ ID NO: 49292 - protein, 13 aa, synthetic construct
AAWDLGTTGWFKI

SEQ ID NO: 49293 - protein, 14 aa, synthetic construct
AAWAFTHTTGWFKI

SEQ ID NO: 49294 - protein, 13 aa, synthetic construct
AAWAQHTTGWFKI

SEQ ID NO: 49295 - protein, 13 aa, synthetic construct
AARSPRATGWFKI

SEQ ID NO: 49296 - protein, 13 aa, synthetic construct
AALSPRATGWFKI

SEQ ID NO: 49297 - protein, 12 aa, synthetic construct
AAWDYTTGWFKL

SEQ ID NO: 49298 - protein, 12 aa, synthetic construct
AAWDYTTGRFKI

SEQ ID NO: 49299 - protein, 12 aa, synthetic construct
AARDYTTGWFKI

SEQ ID NO: 49300 - protein, 14 aa, synthetic construct
AAWDYRGSTGWFKI

SEQ ID NO: 49301 - protein, 9 aa, synthetic construct
AALWGWFKI

SEQ ID NO: 49302 - protein, 13 aa, synthetic construct
ATWDSHTTGWFKI

SEQ ID NO: 49303 - protein, 11 aa, synthetic construct
AAWGSTGWFKI

SEQ ID NO: 49304 - protein, 14 aa, synthetic construct
AAWDFTRTTGWFKI

SEQ ID NO: 49305 - protein, 13 aa, synthetic construct
AAWDSNTTGWFKI

SEQ ID NO: 49306 - protein, 12 aa, synthetic construct
AAWGFATGWFKI

SEQ ID NO: 49307 - protein, 14 aa, synthetic construct
AACDYRGATGWFKI

SEQ ID NO: 49308 - protein, 9 aa, synthetic construct
AACDYYKKL

SEQ ID NO: 49309 - protein, 9 aa, synthetic construct
AAWWGWFRI

SEQ ID NO: 49310 - protein, 9 aa, synthetic construct
AAWEYYKKL

SEQ ID NO: 49311 - protein, 11 aa, synthetic construct
AAWDSAGWFKI

SEQ ID NO: 49312 - protein, 14 aa, synthetic construct
AAWDSTHTTGWFKI

SEQ ID NO: 49313 - protein, 13 aa, synthetic construct
AAWDQHTPGWFKI

SEQ ID NO: 49314 - protein, 13 aa, synthetic construct
AAWSPRATGWFNI

SEQ ID NO: 49315 - protein, 12 aa, synthetic construct
AAWDWTTGWFKI

SEQ ID NO: 49316 - protein, 14 aa, synthetic construct
AAWGFTHTTGWFKI

SEQ ID NO: 49317 - protein, 12 aa, synthetic construct
AAWDIIAGWFKI

SEQ ID NO: 49318 - protein, 12 aa, synthetic construct
AAWDFATGLFKI

SEQ ID NO: 49319 - protein, 9 aa, synthetic construct
ASTTGWFQI

SEQ ID NO: 49320 - protein, 11 aa, synthetic construct
LRGILPLVGSR

SEQ ID NO: 49321 - protein, 12 aa, synthetic construct
AAWVDTPGWFKI

SEQ ID NO: 49322 - protein, 14 aa, synthetic construct
AAWDFTHTPGWFKI

SEQ ID NO: 49323 - protein, 11 aa, synthetic construct
AAWDCSGWLKI

SEQ ID NO: 49324 - protein, 12 aa, synthetic construct
AAWDFAPGWFKI

SEQ ID NO: 49325 - protein, 12 aa, synthetic construct
AAWDSATGWFKI

SEQ ID NO: 49326 - protein, 10 aa, synthetic construct
AAWDSCWFKI

SEQ ID NO: 49327 - protein, 13 aa, synthetic construct
AAWDSHITGWFKI

SEQ ID NO: 49328 - protein, 13 aa, synthetic construct
AAWDSHSTGWFKI

SEQ ID NO: 49329 - protein, 14 aa, synthetic construct
AAWDFTNTTGWFKI

SEQ ID NO: 49330 - protein, 12 aa, synthetic construct
AAWDFATGRFKI

SEQ ID NO: 49331 - protein, 13 aa, synthetic construct
AAWDSHTSGWFKI

SEQ ID NO: 49332 - protein, 13 aa, synthetic construct
AAWDRDTTGWFKI

SEQ ID NO: 49333 - protein, 12 aa, synthetic construct
AAWDFATCWFKI

SEQ ID NO: 49334 - protein, 12 aa, synthetic construct
AAWDYIAGWFKI

SEQ ID NO: 49335 - protein, 11 aa, synthetic construct
AAWDSTGWFRI

SEQ ID NO: 49336 - protein, 13 aa, synthetic construct
AAWDQRTTGWFKI

SEQ ID NO: 49337 - protein, 14 aa, synthetic construct
AAWDFTPTTGWFKI

SEQ ID NO: 49338 - protein, 13 aa, synthetic construct
AAWDYHTTGLFKI

SEQ ID NO: 49339 - protein, 13 aa, synthetic construct
AAWSPRATCWFKI

SEQ ID NO: 49340 - protein, 12 aa, synthetic construct
AAWVETTGWFKI

SEQ ID NO: 49341 - protein, 13 aa, synthetic construct
AAWDQHTTGWFNI

SEQ ID NO: 49342 - protein, 13 aa, synthetic construct
AAWDQHTAGWFKI

SEQ ID NO: 49343 - protein, 11 aa, synthetic construct
AAWDTTGWFEI

SEQ ID NO: 49344 - protein, 14 aa, synthetic construct
AAWDFNHTTGWFKI

SEQ ID NO: 49345 - protein, 12 aa, synthetic construct
AAWVDTTGWFKM

SEQ ID NO: 49346 - protein, 14 aa, synthetic construct
AAWDFTHNTGWFKI

SEQ ID NO: 49347 - protein, 14 aa, synthetic construct
AAWDLTHNTGWFKI

SEQ ID NO: 49348 - protein, 14 aa, synthetic construct
AAWDFTQTTGWFKI

SEQ ID NO: 49349 - protein, 12 aa, synthetic construct
AAWDYPTGWFKI

SEQ ID NO: 49350 - protein, 12 aa, synthetic construct
AAWDYNTGWLKI

SEQ ID NO: 49351 - protein, 11 aa, synthetic construct
LRGIIPLVGSR

SEQ ID NO: 49352 - protein, 13 aa, synthetic construct
AAWGLFTTGWFKI

SEQ ID NO: 49353 - protein, 13 aa, synthetic construct
AAWNSHTTGWFKI

SEQ ID NO: 49354 - protein, 8 aa, synthetic construct
LRGGVGSR

SEQ ID NO: 49355 - protein, 12 aa, synthetic construct
AAWGDTTGWFKI

SEQ ID NO: 49356 - protein, 12 aa, synthetic construct
AARDFATGWFKI

SEQ ID NO: 49357 - protein, 14 aa, synthetic construct
AARDFTHTTGWFKI

SEQ ID NO: 49358 - protein, 11 aa, synthetic construct
SAWDSTGWFKI

SEQ ID NO: 49359 - protein, 13 aa, synthetic construct
VAWDSHTTGWFKI

SEQ ID NO: 49360 - protein, 12 aa, synthetic construct
AAWIIIAGWFKV

SEQ ID NO: 49361 - protein, 12 aa, synthetic construct
AAGVDTTGWFKI

SEQ ID NO: 49362 - protein, 14 aa, synthetic construct
AAGDYRGATGWFKI

SEQ ID NO: 49363 - protein, 13 aa, synthetic construct
SAWSPRATGWFKI

SEQ ID NO: 49364 - protein, 14 aa, synthetic construct
AAWDCRGATGWFKI

SEQ ID NO: 49365 - protein, 12 aa, synthetic construct
DAWDFATGWFKI

SEQ ID NO: 49366 - protein, 9 aa, synthetic construct
AAWRGWFKI

SEQ ID NO: 49367 - protein, 12 aa, synthetic construct
AAWDFDTGWFKI

SEQ ID NO: 49368 - protein, 13 aa, synthetic construct
AAWSTRATGWFKI

SEQ ID NO: 49369 - protein, 13 aa, synthetic construct
AAWSPRATGWSKI

SEQ ID NO: 49370 - protein, 12 aa, synthetic construct
AAWVGTTGWFKI

SEQ ID NO: 49371 - protein, 12 aa, synthetic construct
AAWVDTTGWFEI

SEQ ID NO: 49372 - protein, 13 aa, synthetic construct
AAWDSHNTGLFKI

SEQ ID NO: 49373 - protein, 9 aa, synthetic construct
AAWWSWFKI

SEQ ID NO: 49374 - protein, 12 aa, synthetic construct
AAWADTTGWLKI

SEQ ID NO: 49375 - protein, 9 aa, synthetic construct
AAWDYYKKH

SEQ ID NO: 49376 - protein, 13 aa, synthetic construct
AEWDSHTTGWFKI

SEQ ID NO: 49377 - protein, 8 aa, synthetic construct
AAWDFATG

SEQ ID NO: 49378 - protein, 9 aa, synthetic construct
AACWGWFKI

SEQ ID NO: 49379 - protein, 13 aa, synthetic construct
AAWDSPTTGWFKI

SEQ ID NO: 49380 - protein, 12 aa, synthetic construct
AAWDYTTGWVKI

SEQ ID NO: 49381 - protein, 14 aa, synthetic construct
AAWDDRGATGWFKI

SEQ ID NO: 49382 - protein, 12 aa, synthetic construct
AAWVDTTCWFKI

SEQ ID NO: 49383 - protein, 14 aa, synthetic construct
AAWDYRGATGRFKI

SEQ ID NO: 49384 - protein, 12 aa, synthetic construct
AAWGLYTGWFKI

SEQ ID NO: 49385 - protein, 12 aa, synthetic construct
AAWNYTTGWFKI

SEQ ID NO: 49386 - protein, 12 aa, synthetic construct
AAWDFATGWFKL

SEQ ID NO: 49387 - protein, 11 aa, synthetic construct
AAWETTGWFKI

SEQ ID NO: 49388 - protein, 11 aa, synthetic construct
AAWDSTGWCKI

SEQ ID NO: 49389 - protein, 12 aa, synthetic construct
AAWDFATGWFEI

SEQ ID NO: 49390 - protein, 12 aa, synthetic construct
AAWPDTTGWFKI

SEQ ID NO: 49391 - protein, 14 aa, synthetic construct
AAWDYRGATGLFKI

SEQ ID NO: 49392 - protein, 14 aa, synthetic construct
AAWDFTHTTGWFKM

SEQ ID NO: 49393 - protein, 13 aa, synthetic construct
AAWDQHTTGWFEI

SEQ ID NO: 49394 - protein, 13 aa, synthetic construct
AAWDSHTTGWFKT

SEQ ID NO: 49395 - protein, 14 aa, synthetic construct
AAWDFTHTTCWFKI

SEQ ID NO: 49396 - protein, 12 aa, synthetic construct
AAWDHTTGWFKI

SEQ ID NO: 49397 - protein, 9 aa, synthetic construct
DAWWGWFKI

SEQ ID NO: 49398 - protein, 13 aa, synthetic construct
AAWSPRATGWFRI

SEQ ID NO: 49399 - protein, 9 aa, synthetic construct
AAWDYYNKL

SEQ ID NO: 49400 - protein, 12 aa, synthetic construct
AAWDYTNGWFKI

SEQ ID NO: 49401 - protein, 11 aa, synthetic construct
AAWACSGWFKI

SEQ ID NO: 49402 - protein, 11 aa, synthetic construct
AAWDSTGWFKV

SEQ ID NO: 49403 - protein, 11 aa, synthetic construct
AAWGTTGWFKI

SEQ ID NO: 49404 - protein, 13 aa, synthetic construct
AAWSPRATGWFTI

SEQ ID NO: 49405 - protein, 9 aa, synthetic construct
ASWWGWFKI

SEQ ID NO: 49406 - protein, 11 aa, synthetic construct
AAWDWTGWFKI

SEQ ID NO: 49407 - protein, 12 aa, synthetic construct
AAWETYTGWFKI

SEQ ID NO: 49408 - protein, 9 aa, synthetic construct
AAWCGWFKI

SEQ ID NO: 49409 - protein, 11 aa, synthetic construct
AAWEYTGWFKI

SEQ ID NO: 49410 - protein, 9 aa, synthetic construct
ANTTGWFKI

SEQ ID NO: 49411 - protein, 12 aa, synthetic construct
LRGPPGPLVGSR

SEQ ID NO: 49412 - protein, 11 aa, synthetic construct
AAWASTGWFKI

SEQ ID NO: 49413 - protein, 11 aa, synthetic construct
AAWDFTHTTGW

SEQ ID NO: 49414 - protein, 11 aa, synthetic construct
AAWYSTGWFKI

SEQ ID NO: 49415 - protein, 14 aa, synthetic construct
AAWDYRVATGWFKI

SEQ ID NO: 49416 - protein, 12 aa, synthetic construct
AAWDFTTGWFKI

SEQ ID NO: 49417 - protein, 14 aa, synthetic construct
AAWDYRGATCWFKI

SEQ ID NO: 49418 - protein, 13 aa, synthetic construct
AAWDRHTTGWFKI

SEQ ID NO: 49419 - protein, 11 aa, synthetic construct
AAWDCTGWSKI

SEQ ID NO: 49420 - protein, 12 aa, synthetic construct
AAWDFAAGWFKI

SEQ ID NO: 49421 - protein, 11 aa, synthetic construct
AALDTTGWFKI

SEQ ID NO: 49422 - protein, 12 aa, synthetic construct
AAWDEATGWFKI

SEQ ID NO: 49423 - protein, 14 aa, synthetic construct
ASWDYIGATGWFKI

SEQ ID NO: 49424 - protein, 12 aa, synthetic construct
AAWDDTTGWFKI

SEQ ID NO: 49425 - protein, 11 aa, synthetic construct
AAWVFTGWFKI

SEQ ID NO: 49426 - protein, 12 aa, synthetic construct
ASWDYTTGWFKI

SEQ ID NO: 49427 - protein, 12 aa, synthetic construct
AAWYYTTGWFKI

SEQ ID NO: 49428 - protein, 11 aa, synthetic construct
AAWDCSGRFKI

SEQ ID NO: 49429 - protein, 13 aa, synthetic construct
AAWSPRATGWLNI

SEQ ID NO: 49430 - protein, 12 aa, synthetic construct
AAWDFANGWFKI

SEQ ID NO: 49431 - protein, 13 aa, synthetic construct
AAWDQNTTGWFKI

SEQ ID NO: 49432 - protein, 11 aa, synthetic construct
AAWDCTGWLKI

SEQ ID NO: 49433 - protein, 12 aa, synthetic construct
AAWDYNRCWFKI

SEQ ID NO: 49434 - protein, 12 aa, synthetic construct
ASWVDTTGWFKI

SEQ ID NO: 49435 - protein, 13 aa, synthetic construct
AAWDQHTTGWSKI

SEQ ID NO: 49436 - protein, 13 aa, synthetic construct
AAWDYHNTGWFKI

SEQ ID NO: 49437 - protein, 13 aa, synthetic construct
AAWDSYTTGWFKI

SEQ ID NO: 49438 - protein, 9 aa, synthetic construct
ARTTGWFKI

SEQ ID NO: 49439 - protein, 9 aa, synthetic construct
AITTGWFKI

SEQ ID NO: 49440 - protein, 9 aa, synthetic construct
ASTTGWFKR

SEQ ID NO: 49441 - protein, 9 aa, synthetic construct
ASTTGWFKK

SEQ ID NO: 49442 - protein, 9 aa, synthetic construct
AAWGYYKKL

SEQ ID NO: 49443 - protein, 9 aa, synthetic construct
ASTTGWFEI

SEQ ID NO: 49444 - protein, 12 aa, synthetic construct
AAWVDATGWFKI

SEQ ID NO: 49445 - protein, 14 aa, synthetic construct
AAWDWVYTTGWFKI

SEQ ID NO: 49446 - protein, 12 aa, synthetic construct
AAWDYTTGWFKK

SEQ ID NO: 49447 - protein, 13 aa, synthetic construct
SAWDSHTTGWFKI

SEQ ID NO: 49448 - protein, 12 aa, synthetic construct
AAWDLATGWFKI

SEQ ID NO: 49449 - protein, 10 aa, synthetic construct
AAWDFTHTTG

SEQ ID NO: 49450 - protein, 12 aa, synthetic construct
AAWVDNTGWFKI

SEQ ID NO: 49451 - protein, 14 aa, synthetic construct
AAWDFTHTTGWFEI

SEQ ID NO: 49452 - protein, 8 aa, synthetic construct
AAWVDTTG

SEQ ID NO: 49453 - protein, 14 aa, synthetic construct
AAWDFTHTTGWFQI

SEQ ID NO: 49454 - protein, 14 aa, synthetic construct
AAWDYEETTGWFNI

SEQ ID NO: 49455 - protein, 12 aa, synthetic construct
AAWVDTTGWFKK

SEQ ID NO: 49456 - protein, 12 aa, synthetic construct
AAWVDTTGWFKV

SEQ ID NO: 49457 - protein, 13 aa, synthetic construct
AALDQHTTGLFKI

SEQ ID NO: 49458 - protein, 13 aa, synthetic construct
ASWDSHTTGLFKI

SEQ ID NO: 49459 - protein, 13 aa, synthetic construct
AAWDTHTTGWFKI

SEQ ID NO: 49460 - protein, 12 aa, synthetic construct
AAWDFATDWFKI

SEQ ID NO: 49461 - protein, 13 aa, synthetic construct
AAWDYYTTGWFKI

SEQ ID NO: 49462 - protein, 8 aa, synthetic construct
LVPLVGSR

SEQ ID NO: 49463 - protein, 12 aa, synthetic construct
AAWVDTTGWFRI

SEQ ID NO: 49464 - protein, 12 aa, synthetic construct
AAWDFATGWFKM

SEQ ID NO: 49465 - protein, 12 aa, synthetic construct
AAWDFATGWFKV

SEQ ID NO: 49466 - protein, 13 aa, synthetic construct
AAWDQHTNGWFKI

SEQ ID NO: 49467 - protein, 13 aa, synthetic construct
AGWDSHTTGWFKI

SEQ ID NO: 49468 - protein, 13 aa, synthetic construct
AAWISDATGWFKI

SEQ ID NO: 49469 - protein, 13 aa, synthetic construct
ASWDQHTTGWFKI

SEQ ID NO: 49470 - protein, 12 aa, synthetic construct
AAWVDTTGWFQI

SEQ ID NO: 49471 - protein, 13 aa, synthetic construct
AAWDYHTTGWLKI

SEQ ID NO: 49472 - protein, 12 aa, synthetic construct
AAWDFATSWFKI

SEQ ID NO: 49473 - protein, 12 aa, synthetic construct
ASWDFATGWFKI

SEQ ID NO: 49474 - protein, 12 aa, synthetic construct
AAWDFDTGWFNI

SEQ ID NO: 49475 - protein, 12 aa, synthetic construct
AAWDFATGWFKT

SEQ ID NO: 49476 - protein, 12 aa, synthetic construct
AAWVNTTGWFKI

SEQ ID NO: 49477 - protein, 13 aa, synthetic construct
AAWDSHTTGWFMI

SEQ ID NO: 49478 - protein, 12 aa, synthetic construct
AAWSPRATGWFK

SEQ ID NO: 49479 - protein, 14 aa, synthetic construct
AAWDYRGATGWFKK

SEQ ID NO: 49480 - protein, 11 aa, synthetic construct
AAWDSTGWFKL

SEQ ID NO: 49481 - protein, 12 aa, synthetic construct
AAWDYTSGWFKI

SEQ ID NO: 49482 - protein, 12 aa, synthetic construct
AVWDYTTGWFKI

SEQ ID NO: 49483 - protein, 12 aa, synthetic construct
AAWADTTGWFNI

SEQ ID NO: 49484 - protein, 9 aa, synthetic construct
AVWDYYKKL

SEQ ID NO: 49485 - protein, 9 aa, synthetic construct
AALDYYKKL

SEQ ID NO: 49486 - protein, 14 aa, synthetic construct
AAWYYRGATGWFKI

SEQ ID NO: 49487 - protein, 11 aa, synthetic construct
AARDSTGWFKI

SEQ ID NO: 49488 - protein, 13 aa, synthetic construct
AAWSPRATGCFKI

SEQ ID NO: 49489 - protein, 13 aa, synthetic construct
AAWDSHTTGLFNI

SEQ ID NO: 49490 - protein, 13 aa, synthetic construct
AAWYPRATGWFKI

SEQ ID NO: 49491 - protein, 11 aa, synthetic construct
AAWDSTGRFKI

SEQ ID NO: 49492 - protein, 13 aa, synthetic construct
AAWDSHTTSWFKI

SEQ ID NO: 49493 - protein, 10 aa, synthetic construct
AAWDYRGATG

SEQ ID NO: 49494 - protein, 12 aa, synthetic construct
VAWVDTTGWFKI

SEQ ID NO: 49495 - protein, 12 aa, synthetic construct
AAWDYTIGWFKI

SEQ ID NO: 49496 - protein, 11 aa, synthetic construct
AARDCTGWFKI

SEQ ID NO: 49497 - protein, 11 aa, synthetic construct
AACDSTGWFKI

SEQ ID NO: 49498 - protein, 14 aa, synthetic construct
TAWDYRGATGWFKI

SEQ ID NO: 49499 - protein, 14 aa, synthetic construct
AAWDYRGATGWFKM

SEQ ID NO: 49500 - protein, 7 aa, synthetic construct
AAWDSTG

SEQ ID NO: 49501 - protein, 12 aa, synthetic construct
AAWDYSTGWFKI

SEQ ID NO: 49502 - protein, 14 aa, synthetic construct
AAWAYRGAPGWFKI

SEQ ID NO: 49503 - protein, 8 aa, synthetic construct
AAWCWFKI

SEQ ID NO: 49504 - protein, 13 aa, synthetic construct
AAWSPGATGWFKI

SEQ ID NO: 49505 - protein, 9 aa, synthetic construct
AAWWGGFKI

SEQ ID NO: 49506 - protein, 14 aa, synthetic construct
AAWDYSGATGWFKI

SEQ ID NO: 49507 - protein, 13 aa, synthetic construct
AACSPRATGWFKI

SEQ ID NO: 49508 - protein, 9 aa, synthetic construct
AARDYYKKL

SEQ ID NO: 49509 - protein, 13 aa, synthetic construct
AAWNQHTTGWFKI

SEQ ID NO: 49510 - protein, 11 aa, synthetic construct
AAWVSTGWFKI

SEQ ID NO: 49511 - protein, 13 aa, synthetic construct
AAWSPRATGWFMI

SEQ ID NO: 49512 - protein, 13 aa, synthetic construct
AAWDSHTTGWFKK

SEQ ID NO: 49513 - protein, 13 aa, synthetic construct
AAWSPRATGWFKV

SEQ ID NO: 49514 - protein, 11 aa, synthetic construct
AAWDSTGWFKT

SEQ ID NO: 49515 - protein, 12 aa, synthetic construct
AAWDYTTGGFKI

SEQ ID NO: 49516 - protein, 12 aa, synthetic construct
AAWANTTGWFKI

SEQ ID NO: 49517 - protein, 11 aa, synthetic construct
AAGDCSGWFKI

SEQ ID NO: 49518 - protein, 12 aa, synthetic construct
AACVDTTGWFKI

SEQ ID NO: 49519 - protein, 12 aa, synthetic construct
AALDYTTGWLKI

SEQ ID NO: 49520 - protein, 9 aa, synthetic construct
AAWSPRATG

SEQ ID NO: 49521 - protein, 14 aa, synthetic construct
AAWDYRGATSWFKI

SEQ ID NO: 49522 - protein, 12 aa, synthetic construct
AAWAYTTGWLKI

SEQ ID NO: 49523 - protein, 13 aa, synthetic construct
AVWDQHTTGWFKI

SEQ ID NO: 49524 - protein, 13 aa, synthetic construct
AAWSPRATGWFKT

SEQ ID NO: 49525 - protein, 14 aa, synthetic construct
AAWDLTHTTGWFNI

SEQ ID NO: 49526 - protein, 14 aa, synthetic construct
AACDYEETTGWFKI

SEQ ID NO: 49527 - protein, 9 aa, synthetic construct
AAWWGWFQI

SEQ ID NO: 49528 - protein, 11 aa, synthetic construct
AACDTTGWFKI

SEQ ID NO: 49529 - protein, 13 aa, synthetic construct
AAWDSHTTGWIKI

SEQ ID NO: 49530 - protein, 12 aa, synthetic construct
AAWVDTTGWFEV

SEQ ID NO: 49531 - protein, 12 aa, synthetic construct
AAWDMPTGWFKI

SEQ ID NO: 49532 - protein, 8 aa, synthetic construct
AAWDWFKI

SEQ ID NO: 49533 - protein, 14 aa, synthetic construct
AAGDYRGAPGWFKI

SEQ ID NO: 49534 - protein, 12 aa, synthetic construct
AAWDVATGWFKI

SEQ ID NO: 49535 - protein, 12 aa, synthetic construct
AAWDRGTGWFKI

SEQ ID NO: 49536 - protein, 13 aa, synthetic construct
VAWSPRATGWFKI

SEQ ID NO: 49537 - protein, 9 aa, synthetic construct
VSTTGWFKI

SEQ ID NO: 49538 - protein, 12 aa, synthetic construct
AAWEHTTGWFKI

SEQ ID NO: 49539 - protein, 11 aa, synthetic construct
AAAGGGYYKKL

SEQ ID NO: 49540 - protein, 12 aa, synthetic construct
AAWENTTGWFKI

SEQ ID NO: 49541 - protein, 12 aa, synthetic construct
AACADTTGWFKI

SEQ ID NO: 49542 - protein, 14 aa, synthetic construct
AAWGYIGATGWFKI

SEQ ID NO: 49543 - protein, 13 aa, synthetic construct
AAWDHHTTGWFKI

SEQ ID NO: 49544 - protein, 13 aa, synthetic construct
AAWDSNNTGWFKI

SEQ ID NO: 49545 - protein, 9 aa, synthetic construct
AAWWGLLKI

SEQ ID NO: 49546 - protein, 9 aa, synthetic construct
AAWWGRFKI

SEQ ID NO: 49547 - protein, 12 aa, synthetic construct
AAWVDTTGLFKI

SEQ ID NO: 49548 - protein, 14 aa, synthetic construct
AAWDHRGATGWFKI

SEQ ID NO: 49549 - protein, 14 aa, synthetic construct
AAWDITHTTGWFKI

SEQ ID NO: 49550 - protein, 14 aa, synthetic construct
AAWDLTHTTGGFKI

SEQ ID NO: 49551 - protein, 13 aa, synthetic construct
AAWESHTTGLFKI

SEQ ID NO: 49552 - protein, 12 aa, synthetic construct
AAWGFATGWFKL

SEQ ID NO: 49553 - protein, 13 aa, synthetic construct
AAWDSHTTVWFKI

SEQ ID NO: 49554 - protein, 9 aa, synthetic construct
AAWWGWFKK

SEQ ID NO: 49555 - protein, 9 aa, synthetic construct
AAWDYCKKL

SEQ ID NO: 49556 - protein, 13 aa, synthetic construct
VAWDQHTTGWFKI

SEQ ID NO: 49557 - protein, 10 aa, synthetic construct
AAWDWYYKKL

SEQ ID NO: 49558 - protein, 9 aa, synthetic construct
AAWWGWFKR

SEQ ID NO: 49559 - protein, 9 aa, synthetic construct
AAWWGWFKT

SEQ ID NO: 49560 - protein, 10 aa, synthetic construct
AAWGTGWFKI

SEQ ID NO: 49561 - protein, 13 aa, synthetic construct
AAWDSHTTGWYKI

SEQ ID NO: 49562 - protein, 12 aa, synthetic construct
AAGDYTTGWLKI

SEQ ID NO: 49563 - protein, 11 aa, synthetic construct
AAWDTTGLFKI

SEQ ID NO: 49564 - protein, 11 aa, synthetic construct
AAWDTTGWFKT

SEQ ID NO: 49565 - protein, 9 aa, synthetic construct
AAWEYHKKL

SEQ ID NO: 49566 - protein, 12 aa, synthetic construct
SAWVDTTGWFKI

SEQ ID NO: 49567 - protein, 13 aa, synthetic construct
AAWFPRATGWFKI

SEQ ID NO: 49568 - protein, 13 aa, synthetic construct
AAWDSHPTGWFKI

SEQ ID NO: 49569 - protein, 11 aa, synthetic construct
AEWDSTGWFKI

SEQ ID NO: 49570 - protein, 14 aa, synthetic construct
AAGDFTQTTGWFNI

SEQ ID NO: 49571 - protein, 13 aa, synthetic construct
AAWDSHNTGWFNI

SEQ ID NO: 49572 - protein, 11 aa, synthetic construct
AAWDSTGWYKI

SEQ ID NO: 49573 - protein, 13 aa, synthetic construct
AAWDQHTTGWVKI

SEQ ID NO: 49574 - protein, 12 aa, synthetic construct
AAGAYTTGWFKI

SEQ ID NO: 49575 - protein, 11 aa, synthetic construct
AAWDSTGWFKR

SEQ ID NO: 49576 - protein, 13 aa, synthetic construct
AAWYQHTTGWFKI

SEQ ID NO: 49577 - protein, 12 aa, synthetic construct
AAWEYNTGWFKI

SEQ ID NO: 49578 - protein, 12 aa, synthetic construct
AAWVIYTGWFKI

SEQ ID NO: 49579 - protein, 14 aa, synthetic construct
AAWEYRGAPGWFKI

SEQ ID NO: 49580 - protein, 13 aa, synthetic construct
AAWDQQNTGWFKI

SEQ ID NO: 49581 - protein, 11 aa, synthetic construct
AAGDCTGWFKI

SEQ ID NO: 49582 - protein, 11 aa, synthetic construct
AAWDSAGWLKI

SEQ ID NO: 49583 - protein, 9 aa, synthetic construct
AAWEGWFKI

SEQ ID NO: 49584 - protein, 13 aa, synthetic construct
AAWDQYTTGWFKI

SEQ ID NO: 49585 - protein, 11 aa, synthetic construct
AAWYTTGWFKI

SEQ ID NO: 49586 - protein, 9 aa, synthetic construct
ACTTGWFKI

SEQ ID NO: 49587 - protein, 13 aa, synthetic construct
AAWDSHTIGWFKI

SEQ ID NO: 49588 - protein, 13 aa, synthetic construct
AAWDQHTTGWFKT

SEQ ID NO: 49589 - protein, 9 aa, synthetic construct
AAWGGWFKV

SEQ ID NO: 49590 - protein, 13 aa, synthetic construct
AAWDSHTKGWFKI

SEQ ID NO: 49591 - protein, 13 aa, synthetic construct
AGWDQHTTGWFKI

SEQ ID NO: 49592 - protein, 14 aa, synthetic construct
AGWDFTHTTGWFKI

SEQ ID NO: 49593 - protein, 13 aa, synthetic construct
AAWDSHTTGWCKI

SEQ ID NO: 49594 - protein, 14 aa, synthetic construct
AAWDPSHTTGWFKI

SEQ ID NO: 49595 - protein, 10 aa, synthetic construct
AAWDSHTTGW

SEQ ID NO: 49596 - protein, 14 aa, synthetic construct
SAWDYRGATGWFKI

SEQ ID NO: 49597 - protein, 11 aa, synthetic construct
AAGDTTGWFKI

SEQ ID NO: 49598 - protein, 13 aa, synthetic construct
AAWDSHTTGGFKI

SEQ ID NO: 49599 - protein, 13 aa, synthetic construct
AAWDSHTTGCFKI

SEQ ID NO: 49600 - protein, 12 aa, synthetic construct
TAWDYTTGWFKI

SEQ ID NO: 49601 - protein, 13 aa, synthetic construct
TAWDSHTTGWFKI

SEQ ID NO: 49602 - protein, 8 aa, synthetic construct
AAWDSHTT

SEQ ID NO: 49603 - protein, 11 aa, synthetic construct
AAFYTTGWFKI

SEQ ID NO: 49604 - protein, 11 aa, synthetic construct
AAGDSTGWFNI

SEQ ID NO: 49605 - protein, 11 aa, synthetic construct
AAWDSTGCFKI

SEQ ID NO: 49606 - protein, 9 aa, synthetic construct
AAWGCWFKI

SEQ ID NO: 49607 - protein, 12 aa, synthetic construct
AAGAFATGWFKI

SEQ ID NO: 49608 - protein, 13 aa, synthetic construct
AAWDQHTTGLLNI

SEQ ID NO: 49609 - protein, 13 aa, synthetic construct
AAGDSQTTGWFKI

SEQ ID NO: 49610 - protein, 13 aa, synthetic construct
AAWDQHTTGWCKI

SEQ ID NO: 49611 - protein, 13 aa, synthetic construct
AAGDSHTPGWFKI

SEQ ID NO: 49612 - protein, 13 aa, synthetic construct
AAGESHTTGWFKI

SEQ ID NO: 49613 - protein, 12 aa, synthetic construct
AARVDTTGWFKI

SEQ ID NO: 49614 - protein, 12 aa, synthetic construct
SAWDFATGWFKI

SEQ ID NO: 49615 - protein, 12 aa, synthetic construct
AAWAETTGWFKI

SEQ ID NO: 49616 - protein, 13 aa, synthetic construct
AAWSPRATGWVKI

SEQ ID NO: 49617 - protein, 13 aa, synthetic construct
AAWAPRATGWFKI

SEQ ID NO: 49618 - protein, 14 aa, synthetic construct
AAWDYRGATGWFEI

SEQ ID NO: 49619 - protein, 11 aa, synthetic construct
AAWDCYGWFKI

SEQ ID NO: 49620 - protein, 9 aa, synthetic construct
AAWDCYKKL

SEQ ID NO: 49621 - protein, 14 aa, synthetic construct
AAWDYKGATGWFKI

SEQ ID NO: 49622 - protein, 12 aa, synthetic construct
AAWDYITGWFKI

SEQ ID NO: 49623 - protein, 13 aa, synthetic construct
AAWSPRATSWFKI

SEQ ID NO: 49624 - protein, 14 aa, synthetic construct
AAWDYRGATGWFKL

SEQ ID NO: 49625 - protein, 13 aa, synthetic construct
AAWSPRDTGWFKI

SEQ ID NO: 49626 - protein, 12 aa, synthetic construct
AAWDYTTVWFKI

SEQ ID NO: 49627 - protein, 14 aa, synthetic construct
AAWDFAHTTGWFKI

SEQ ID NO: 49628 - protein, 12 aa, synthetic construct
AAWDFAPGWLKI

SEQ ID NO: 49629 - protein, 11 aa, synthetic construct
AAWDCTGWFKV

SEQ ID NO: 49630 - protein, 11 aa, synthetic construct
ASWDSTGWFKI

SEQ ID NO: 49631 - protein, 11 aa, synthetic construct
LRGSIPLVGSR

SEQ ID NO: 49632 - protein, 12 aa, synthetic construct
AAWADTTGWVKI

SEQ ID NO: 49633 - protein, 14 aa, synthetic construct
AAWDYIGAPGWFKI

SEQ ID NO: 49634 - protein, 12 aa, synthetic construct
AAWADTTGWFKV

SEQ ID NO: 49635 - protein, 13 aa, synthetic construct
AAWSPRTTGWFKI

SEQ ID NO: 49636 - protein, 14 aa, synthetic construct
AAWDYRGATGWSKI

SEQ ID NO: 49637 - protein, 13 aa, synthetic construct
PRGIIEEPLVGSR

SEQ ID NO: 49638 - protein, 12 aa, synthetic construct
AAWDFATGWFKK

SEQ ID NO: 49639 - protein, 10 aa, synthetic construct
AAWITGWFKI

SEQ ID NO: 49640 - protein, 12 aa, synthetic construct
AALAYTTGWFKI

SEQ ID NO: 49641 - protein, 11 aa, synthetic construct
DAWDSTGWLKI

SEQ ID NO: 49642 - protein, 13 aa, synthetic construct
AALDSHTTGWLKI

SEQ ID NO: 49643 - protein, 11 aa, synthetic construct
AAWDCTGWCKI

SEQ ID NO: 49644 - protein, 12 aa, synthetic construct
AAWRHTTGWFKI

SEQ ID NO: 49645 - protein, 12 aa, synthetic construct
LRGILIPMVGSR

SEQ ID NO: 49646 - protein, 14 aa, synthetic construct
AAWDYRGAAGWFKI

SEQ ID NO: 49647 - protein, 13 aa, synthetic construct
AAWSPRATGWFKM

SEQ ID NO: 49648 - protein, 14 aa, synthetic construct
AAWAYEETTGWFKI

SEQ ID NO: 49649 - protein, 13 aa, synthetic construct
AAWDYQTTGWFKI

SEQ ID NO: 49650 - protein, 12 aa, synthetic construct
AAWAYTTGWFEI

SEQ ID NO: 49651 - protein, 12 aa, synthetic construct
AVWDFATGWFKI

SEQ ID NO: 49652 - protein, 9 aa, synthetic construct
AAWAYYKKL

SEQ ID NO: 49653 - protein, 14 aa, synthetic construct
AALDYRGATGLFKI

SEQ ID NO: 49654 - protein, 12 aa, synthetic construct
ATWVDTTGWFKI

SEQ ID NO: 49655 - protein, 11 aa, synthetic construct
AAWDATGWFKI

SEQ ID NO: 49656 - protein, 11 aa, synthetic construct
AAWDCCGWFKI

SEQ ID NO: 49657 - protein, 12 aa, synthetic construct
AAWDYNTGWLNI

SEQ ID NO: 49658 - protein, 13 aa, synthetic construct
AVWSPRATGWFKI

SEQ ID NO: 49659 - protein, 12 aa, synthetic construct
AALGYTTGWFKI

SEQ ID NO: 49660 - protein, 11 aa, synthetic construct
AAWDCNGWFKI

SEQ ID NO: 49661 - protein, 11 aa, synthetic construct
AAWATTGWFKI

SEQ ID NO: 49662 - protein, 12 aa, synthetic construct
AAWDYNTGWFNI

SEQ ID NO: 49663 - protein, 11 aa, synthetic construct
ATWDSTGWFKI

SEQ ID NO: 49664 - protein, 11 aa, synthetic construct
AAWDCSCWFKI

SEQ ID NO: 49665 - protein, 11 aa, synthetic construct
AAWDCSGLFKI

SEQ ID NO: 49666 - protein, 12 aa, synthetic construct
AAWLYTTGWFKI

SEQ ID NO: 49667 - protein, 10 aa, synthetic construct
AAWATGWFKI

SEQ ID NO: 49668 - protein, 12 aa, synthetic construct
CVGFSYHCLVQD

SEQ ID NO: 49669 - protein, 13 aa, synthetic construct
ATWDQHTTGWFKI

SEQ ID NO: 49670 - protein, 12 aa, synthetic construct
AAWDYNRWLFKI

SEQ ID NO: 49671 - protein, 11 aa, synthetic construct
AAWDCTGLFKI

SEQ ID NO: 49672 - protein, 12 aa, synthetic construct
AAWDFATGWSKI

SEQ ID NO: 49673 - protein, 12 aa, synthetic construct
AALDFATGWFNI

SEQ ID NO: 49674 - protein, 14 aa, synthetic construct
AAWDFTHTNGWFKI

SEQ ID NO: 49675 - protein, 12 aa, synthetic construct
DAWDYTTGWLKI

SEQ ID NO: 49676 - protein, 9 aa, synthetic construct
ASTTGWFKL

SEQ ID NO: 49677 - protein, 11 aa, synthetic construct
AAWDFTGWFKI

SEQ ID NO: 49678 - protein, 14 aa, synthetic construct
AAWDFTHITCWFKI

SEQ ID NO: 49679 - protein, 13 aa, synthetic construct
AAWSPRAPGWCKI

SEQ ID NO: 49680 - protein, 14 aa, synthetic construct
AAWDFTHTAGWFKI

SEQ ID NO: 49681 - protein, 9 aa, synthetic construct
ASTTGGFKI

SEQ ID NO: 49682 - protein, 12 aa, synthetic construct
DAWEYTTGWFKI

SEQ ID NO: 49683 - protein, 14 aa, synthetic construct
AAWDFTHTSGWFKI

SEQ ID NO: 49684 - protein, 11 aa, synthetic construct
AAWDYTGWLKI

SEQ ID NO: 49685 - protein, 9 aa, synthetic construct
ASTTCWFKI

SEQ ID NO: 49686 - protein, 12 aa, synthetic construct
AAWVDITGWFKI

SEQ ID NO: 49687 - protein, 13 aa, synthetic construct
DAWSPRATGWFKI

SEQ ID NO: 49688 - protein, 13 aa, synthetic construct
AAWSPQATGWFKI

SEQ ID NO: 49689 - protein, 13 aa, synthetic construct
AAWSPPATGWFKI

SEQ ID NO: 49690 - protein, 14 aa, synthetic construct
AAWDFTHTTGLLKI

SEQ ID NO: 49691 - protein, 14 aa, synthetic construct
AAWDFTHTTGRFKI

SEQ ID NO: 49692 - protein, 9 aa, synthetic construct
ASTAGWFKI

SEQ ID NO: 49693 - protein, 14 aa, synthetic construct
AAWDFTHTTGWFKT

SEQ ID NO: 49694 - protein, 14 aa, synthetic construct
AAWDFTHTTGWFKV

SEQ ID NO: 49695 - protein, 8 aa, synthetic construct
AAWDYTTG

SEQ ID NO: 49696 - protein, 14 aa, synthetic construct
AARDYRGATGWFKI

SEQ ID NO: 49697 - protein, 11 aa, synthetic construct
AARVTTGWFKI

SEQ ID NO: 49698 - protein, 14 aa, synthetic construct
AAWDFTHTTGWFTT

SEQ ID NO: 49699 - protein, 9 aa, synthetic construct
ASTTGWFKM

SEQ ID NO: 49700 - protein, 14 aa, synthetic construct
AVWDYEETTGWFKI

SEQ ID NO: 49701 - protein, 9 aa, synthetic construct
ASTTGWYKI

SEQ ID NO: 49702 - protein, 11 aa, synthetic construct
AAWECSGWFKI

SEQ ID NO: 49703 - protein, 14 aa, synthetic construct
DAWDYRGATGWFKI

SEQ ID NO: 49704 - protein, 10 aa, synthetic construct
AAWIPGWFKI

SEQ ID NO: 49705 - protein, 14 aa, synthetic construct
AAWDFRGATGWFKI

SEQ ID NO: 49706 - protein, 9 aa, synthetic construct
ASTTGWFKV

SEQ ID NO: 49707 - protein, 14 aa, synthetic construct
AAWDYRGTTGWFKI

SEQ ID NO: 49708 - protein, 11 aa, synthetic construct
AAWDFSGWFKI

SEQ ID NO: 49709 - protein, 9 aa, synthetic construct
ASTTGWSKI

SEQ ID NO: 49710 - protein, 12 aa, synthetic construct
AAWDYTTGWFTI

SEQ ID NO: 49711 - protein, 12 aa, synthetic construct
AAWADTPGWFKI

SEQ ID NO: 49712 - protein, 13 aa, synthetic construct
AAWGGDTTGWFKI

SEQ ID NO: 49713 - protein, 13 aa, synthetic construct
AAWGKGTTGWFKI

SEQ ID NO: 49714 - protein, 13 aa, synthetic construct
AAWSHRATGWFEI

SEQ ID NO: 49715 - protein, 9 aa, synthetic construct
AAWGGWFKM

SEQ ID NO: 49716 - protein, 13 aa, synthetic construct
AAWVWDNTGWFKI

SEQ ID NO: 49717 - protein, 13 aa, synthetic construct
AAWSHRAPGWFKI

SEQ ID NO: 49718 - protein, 13 aa, synthetic construct
AAWSPRAPGWVKI

SEQ ID NO: 49719 - protein, 13 aa, synthetic construct
AAWPPRAPGWFKI

SEQ ID NO: 49720 - protein, 12 aa, synthetic construct
AAWVYTTGWFKI

SEQ ID NO: 49721 - protein, 10 aa, synthetic construct
AAWRFGWFKI

SEQ ID NO: 49722 - protein, 13 aa, synthetic construct
AAWSPRAPGWFTI

SEQ ID NO: 49723 - protein, 13 aa, synthetic construct
AAWSPRATCLFNI

SEQ ID NO: 49724 - protein, 12 aa, synthetic construct
AAWSIIAGWFQI

SEQ ID NO: 49725 - protein, 13 aa, synthetic construct
AAWSHRATGWFKI

SEQ ID NO: 49726 - protein, 13 aa, synthetic construct
AAWGHYTTGWFKI

SEQ ID NO: 49727 - protein, 12 aa, synthetic construct
AAWVYTTGWLKI

SEQ ID NO: 49728 - protein, 12 aa, synthetic construct
AAWGIYTGWFKI

SEQ ID NO: 49729 - protein, 12 aa, synthetic construct
AAWGFTTGWSKI

SEQ ID NO: 49730 - protein, 13 aa, synthetic construct
AAWSPRANGWFKI

SEQ ID NO: 49731 - protein, 13 aa, synthetic construct
AAWSPRAAGWFKI

SEQ ID NO: 49732 - protein, 13 aa, synthetic construct
AAWGHRPRGWVKR

SEQ ID NO: 49733 - protein, 13 aa, synthetic construct
AAWSPRATGGVKI

SEQ ID NO: 49734 - protein, 9 aa, synthetic construct
AAWGGWFRI

SEQ ID NO: 49735 - protein, 12 aa, synthetic construct
AAWVVTTGWFKI

SEQ ID NO: 49736 - protein, 13 aa, synthetic construct
AAWGGYTTGWFKI

SEQ ID NO: 49737 - protein, 9 aa, synthetic construct
AAWGGLFKI

SEQ ID NO: 49738 - protein, 12 aa, synthetic construct
AAWSDTTGWFKI

SEQ ID NO: 49739 - protein, 13 aa, synthetic construct
AAWSPRATGGFKI

SEQ ID NO: 49740 - protein, 9 aa, synthetic construct
AAWGGWFKR

SEQ ID NO: 49741 - protein, 13 aa, synthetic construct
AAWSPRATGLVKI

SEQ ID NO: 49742 - protein, 13 aa, synthetic construct
AAWSPRATGVFNI

SEQ ID NO: 49743 - protein, 13 aa, synthetic construct
AAWSPRANGLFKI

SEQ ID NO: 49744 - protein, 13 aa, synthetic construct
AAWSPRAPGWFNI

SEQ ID NO: 49745 - protein, 13 aa, synthetic construct
AAWSPRAPGGVKI

SEQ ID NO: 49746 - protein, 9 aa, synthetic construct
AAWGGWFQI

SEQ ID NO: 49747 - protein, 13 aa, synthetic construct
AAWVSHTTGWLKI

SEQ ID NO: 49748 - protein, 12 aa, synthetic construct
AAWGHTTGWFKI

SEQ ID NO: 49749 - protein, 9 aa, synthetic construct
AAWGGWFNK

SEQ ID NO: 49750 - protein, 13 aa, synthetic construct
AAWSPRATGWCKI

SEQ ID NO: 49751 - protein, 13 aa, synthetic construct
AAWSPRATGWFEI

SEQ ID NO: 49752 - protein, 13 aa, synthetic construct
AAWSPRATGLFNI

SEQ ID NO: 49753 - protein, 13 aa, synthetic construct
AAWSPRASGWFKI

SEQ ID NO: 49754 - protein, 11 aa, synthetic construct
AAWVLTGLFKI

SEQ ID NO: 49755 - protein, 13 aa, synthetic construct
AAWSPRATGWFKL

SEQ ID NO: 49756 - protein, 13 aa, synthetic construct
AAWSSHNTGWVKI

SEQ ID NO: 49757 - protein, 12 aa, synthetic construct
AAWGYATGWFKI

SEQ ID NO: 49758 - protein, 12 aa, synthetic construct
AAWGYTTGWFKT

SEQ ID NO: 49759 - protein, 11 aa, synthetic construct
AAWGWTGWFKI

SEQ ID NO: 49760 - protein, 12 aa, synthetic construct
AAWGYTTGWLKI

SEQ ID NO: 49761 - protein, 12 aa, synthetic construct
AAWGYTTGWLQI

SEQ ID NO: 49762 - protein, 12 aa, synthetic construct
AAWVATTGWFKI

SEQ ID NO: 49763 - protein, 12 aa, synthetic construct
AAWVDTTGWFEM

SEQ ID NO: 49764 - protein, 13 aa, synthetic construct
AAWIIETTGWFKI

SEQ ID NO: 49765 - protein, 10 aa, synthetic construct
AAWTTGWFKI

SEQ ID NO: 49766 - protein, 13 aa, synthetic construct
AAWTPRATGWFKI

SEQ ID NO: 49767 - protein, 12 aa, synthetic construct
AAWIPGTGWFEI

SEQ ID NO: 49768 - protein, 12 aa, synthetic construct
AAWVDTTGWFKT

SEQ ID NO: 49769 - protein, 11 aa, synthetic construct
AAWTGTAWFKI

SEQ ID NO: 49770 - protein, 11 aa, synthetic construct
AAWGSTGWFKL

SEQ ID NO: 49771 - protein, 13 aa, synthetic construct
AAWSYNNTGWLKI

SEQ ID NO: 49772 - protein, 12 aa, synthetic construct
AAWVDTTGRLKI

SEQ ID NO: 49773 - protein, 12 aa, synthetic construct
AAWVDKTGWFKI

SEQ ID NO: 49774 - protein, 12 aa, synthetic construct
AAWGYTTGWFKL

SEQ ID NO: 49775 - protein, 12 aa, synthetic construct
AAWGYNTGWFKI

SEQ ID NO: 49776 - protein, 12 aa, synthetic construct
AAWVDSTGWFKI

SEQ ID NO: 49777 - protein, 12 aa, synthetic construct
AAWVDNTGWLKI

SEQ ID NO: 49778 - protein, 12 aa, synthetic construct
AAWVDNTGWFKM

SEQ ID NO: 49779 - protein, 12 aa, synthetic construct
AAWGYNTGWLEI

SEQ ID NO: 49780 - protein, 12 aa, synthetic construct
AAWVDTTCWLKI

SEQ ID NO: 49781 - protein, 12 aa, synthetic construct
AAWGYTPGWFKI

SEQ ID NO: 49782 - protein, 9 aa, synthetic construct
AAWGYHKKL

SEQ ID NO: 49783 - protein, 12 aa, synthetic construct
AAWVDTTGRFKI

SEQ ID NO: 49784 - protein, 11 aa, synthetic construct
AAWGYTTGGSR

SEQ ID NO: 49785 - protein, 12 aa, synthetic construct
AAWVDTTGGFKI

SEQ ID NO: 49786 - protein, 12 aa, synthetic construct
AAWVDTTGLFEI

SEQ ID NO: 49787 - protein, 12 aa, synthetic construct
AAWVDTTGLLKI

SEQ ID NO: 49788 - protein, 12 aa, synthetic construct
AAWGYTTGWFEI

SEQ ID NO: 49789 - protein, 13 aa, synthetic construct
AAWGYDTTGCLYI

SEQ ID NO: 49790 - protein, 13 aa, synthetic construct
AAWSSRATGWFKI

SEQ ID NO: 49791 - protein, 11 aa, synthetic construct
AAWGSTGWFEV

SEQ ID NO: 49792 - protein, 11 aa, synthetic construct
AAWGKIVGYSD

SEQ ID NO: 49793 - protein, 11 aa, synthetic construct
AAWGSTGGFKL

SEQ ID NO: 49794 - protein, 13 aa, synthetic construct
AAWSPRATGWYKI

SEQ ID NO: 49795 - protein, 13 aa, synthetic construct
AAWSPRATGWVTI

SEQ ID NO: 49796 - protein, 9 aa, synthetic construct
AAWVGWFKI

SEQ ID NO: 49797 - protein, 13 aa, synthetic construct
AAWGSHTHGWFKI

SEQ ID NO: 49798 - protein, 9 aa, synthetic construct
AAWVGWLKI

SEQ ID NO: 49799 - protein, 12 aa, synthetic construct
AAWVDNTWWFKI

SEQ ID NO: 49800 - protein, 12 aa, synthetic construct
AAWVMYTGWFKI

SEQ ID NO: 49801 - protein, 13 aa, synthetic construct
AAWGSHHTGWFKV

SEQ ID NO: 49802 - protein, 9 aa, synthetic construct
AAWLGWLKI

SEQ ID NO: 49803 - protein, 13 aa, synthetic construct
AAWGQHNTGWFKI

SEQ ID NO: 49804 - protein, 13 aa, synthetic construct
AAWSPRATGWFQI

SEQ ID NO: 49805 - protein, 12 aa, synthetic construct
AAWMIIAGWFKI

SEQ ID NO: 49806 - protein, 12 aa, synthetic construct
AAWGLLTGWFKI

SEQ ID NO: 49807 - protein, 10 aa, synthetic construct
AAWGKMDGCI

SEQ ID NO: 49808 - protein, 13 aa, synthetic construct
AAWSPRATGWFKR

SEQ ID NO: 49809 - protein, 13 aa, synthetic construct
AAWGSHTPGWVKI

SEQ ID NO: 49810 - protein, 12 aa, synthetic construct
AAWVFATGWFKI

SEQ ID NO: 49811 - protein, 13 aa, synthetic construct
AAWSPRATVWFKI

SEQ ID NO: 49812 - protein, 12 aa, synthetic construct
AAWVDTTGWVEI

SEQ ID NO: 49813 - protein, 13 aa, synthetic construct
AAWGSRTTGWFKI

SEQ ID NO: 49814 - protein, 13 aa, synthetic construct
AAWSPWATGWFKI

SEQ ID NO: 49815 - protein, 13 aa, synthetic construct
AAWSPRVTGWFNI

SEQ ID NO: 49816 - protein, 12 aa, synthetic construct
AAWVDTTGWLEI

SEQ ID NO: 49817 - protein, 13 aa, synthetic construct
AAWGSLTTGWFMI

SEQ ID NO: 49818 - protein, 13 aa, synthetic construct
AAWGSHTTGWFKV

SEQ ID NO: 49819 - protein, 12 aa, synthetic construct
AAWVDTTGWVQI

SEQ ID NO: 49820 - protein, 13 aa, synthetic construct
AAWGSHTTGGFVV

SEQ ID NO: 49821 - protein, 13 aa, synthetic construct
AAWSPRSTGWFKI

SEQ ID NO: 49822 - protein, 13 aa, synthetic construct
AAWSPRSPGWFKI

SEQ ID NO: 49823 - protein, 12 aa, synthetic construct
AAWVDTTGWYKI

SEQ ID NO: 49824 - protein, 11 aa, synthetic construct
AAWKGTGWYKI

SEQ ID NO: 49825 - protein, 13 aa, synthetic construct
AAWSPRDTRWIKI

SEQ ID NO: 49826 - protein, 12 aa, synthetic construct
AAWVETAWWLKI

SEQ ID NO: 49827 - protein, 12 aa, synthetic construct
AAWVYTTGWLNI

SEQ ID NO: 49828 - protein, 9 aa, synthetic construct
ASDTGWFKI

SEQ ID NO: 49829 - protein, 9 aa, synthetic construct
AAWWGCFKI

SEQ ID NO: 49830 - protein, 13 aa, synthetic construct
EAWDYHTTGWFKI

SEQ ID NO: 49831 - protein, 13 aa, synthetic construct
GGGGLGGWGGGGW

SEQ ID NO: 49832 - protein, 9 aa, synthetic construct
GAWWGWFKI

SEQ ID NO: 49833 - protein, 12 aa, synthetic construct
GAWVDTTGWFKI

SEQ ID NO: 49834 - protein, 13 aa, synthetic construct
GAWSPRGTGWFKI

SEQ ID NO: 49835 - protein, 13 aa, synthetic construct
GAWSPRATGWFKI

SEQ ID NO: 49836 - protein, 9 aa, synthetic construct
GAWDYYKKL

SEQ ID NO: 49837 - protein, 14 aa, synthetic construct
GAWDYRGATGWFKI

SEQ ID NO: 49838 - protein, 13 aa, synthetic construct
GAWDYHTTGWFKI

SEQ ID NO: 49839 - protein, 11 aa, synthetic construct
GAWDSTGWFKI

SEQ ID NO: 49840 - protein, 13 aa, synthetic construct
GAWDQHTTGWVTL

SEQ ID NO: 49841 - protein, 12 aa, synthetic construct
GAWDFGTGWLKI

SEQ ID NO: 49842 - protein, 14 aa, synthetic construct
GAGEYEETPGWFNI

SEQ ID NO: 49843 - protein, 14 aa, synthetic construct
GAGDYSGAPGWLKI

SEQ ID NO: 49844 - protein, 12 aa, synthetic construct
GACDFDTGWVKI

SEQ ID NO: 49845 - protein, 9 aa, synthetic construct
ESTTGWFNI

SEQ ID NO: 49846 - protein, 9 aa, synthetic construct
ESKTGWFKI

SEQ ID NO: 49847 - protein, 11 aa, synthetic construct
EAWDYTGWFKI

SEQ ID NO: 49848 - protein, 13 aa, synthetic construct
GGGGWETTGWVKI

SEQ ID NO: 49849 - protein, 18 aa, synthetic construct
GGGGWQTTGGWQRFGGWA

SEQ ID NO: 49850 - protein, 9 aa, synthetic construct
GGGGYYKKL

SEQ ID NO: 49851 - protein, 10 aa, synthetic construct
LRGITLVGSI

SEQ ID NO: 49852 - protein, 13 aa, synthetic construct
SACEQHTTGWFKI

SEQ ID NO: 49853 - protein, 13 aa, synthetic construct
SACDSHNTGWFKI

SEQ ID NO: 49854 - protein, 11 aa, synthetic construct
PRGIIPLVGSR

SEQ ID NO: 49855 - protein, 12 aa, synthetic construct
LRGSIPLVGSRS

SEQ ID NO: 49856 - protein, 12 aa, synthetic construct
LRGRRIPRVGSR

SEQ ID NO: 49857 - protein, 12 aa, synthetic construct
LRGPSGPLVGSR

SEQ ID NO: 49858 - protein, 10 aa, synthetic construct
LRGIVLVGSR

SEQ ID NO: 49859 - protein, 10 aa, synthetic construct
LRGIPLVCSR

SEQ ID NO: 49860 - protein, 14 aa, synthetic construct
GTWGYIWATGWFKK

SEQ ID NO: 49861 - protein, 13 aa, synthetic construct
LRGIMRKPLVGSR

SEQ ID NO: 49862 - protein, 12 aa, synthetic construct
LRGILIPLVGSI

SEQ ID NO: 49863 - protein, 11 aa, synthetic construct
LRGIIPMVGSR

SEQ ID NO: 49864 - protein, 12 aa, synthetic construct
LRGIIKTLVCSR

SEQ ID NO: 49865 - protein, 9 aa, synthetic construct
LRGIIIRNS

SEQ ID NO: 49866 - protein, 11 aa, synthetic construct
LRGIIIAVGSR

SEQ ID NO: 49867 - skipped

SEQ ID NO: 49868 - protein, 12 aa, synthetic construct
EAWDYNTGWLKI

SEQ ID NO: 49869 - protein, 11 aa, synthetic construct
EAWDSPGWLKI

SEQ ID NO: 49870 - protein, 9 aa, synthetic construct
AAWWGFFKI

SEQ ID NO: 49871 - protein, 14 aa, synthetic construct
EAWDFTHNTGWLNK

SEQ ID NO: 49872 - protein, 12 aa, synthetic construct
DAWDYTTGWFKI

SEQ ID NO: 49873 - protein, 12 aa, synthetic construct
DAWDYTKGWLNI

SEQ ID NO: 49874 - protein, 11 aa, synthetic construct
DAWDYTGWFKI

SEQ ID NO: 49875 - protein, 12 aa, synthetic construct
DAWDYNTGWLKI

SEQ ID NO: 49876 - protein, 11 aa, synthetic construct
DAWDYNGWFKI

SEQ ID NO: 49877 - protein, 14 aa, synthetic construct
DAWDYIGGTGWFKI

SEQ ID NO: 49878 - protein, 13 aa, synthetic construct
DAWDYHTTGWFKI

SEQ ID NO: 49879 - protein, 13 aa, synthetic construct
DAWDYHTKGWLKI

SEQ ID NO: 49880 - protein, 11 aa, synthetic construct
DAWDTTGWFKI

SEQ ID NO: 49881 - protein, 13 aa, synthetic construct
DAWDTHTTGLFKI

SEQ ID NO: 49882 - protein, 11 aa, synthetic construct
DAWDSTCCLKI

SEQ ID NO: 49883 - protein, 13 aa, synthetic construct
DAWDSHTTGWLKI

SEQ ID NO: 49884 - protein, 13 aa, synthetic construct
DAWDSHTTGWFKI

SEQ ID NO: 49885 - protein, 13 aa, synthetic construct
DAWDSHTTGLFKI

SEQ ID NO: 49886 - protein, 13 aa, synthetic construct
DAWDSHTTCWVKI

SEQ ID NO: 49887 - protein, 13 aa, synthetic construct
DAWDSHTNGWFKI

SEQ ID NO: 49888 - protein, 13 aa, synthetic construct
DAWDSHNTGLFKK

SEQ ID NO: 49889 - protein, 9 aa, synthetic construct
DAWDYYKKL

SEQ ID NO: 49890 - protein, 9 aa, synthetic construct
DAWDYYNKL

SEQ ID NO: 49891 - protein, 12 aa, synthetic construct
DAWGYNTGWLKI

SEQ ID NO: 49892 - protein, 13 aa, synthetic construct
DGWDSHTTRWFKK

SEQ ID NO: 49893 - protein, 9 aa, synthetic construct
EALWGCFKI

SEQ ID NO: 49894 - protein, 14 aa, synthetic construct
EAGEYEETNGLFKI

SEQ ID NO: 49895 - protein, 13 aa, synthetic construct
DSWDSQTTGWFKI

SEQ ID NO: 49896 - protein, 14 aa, synthetic construct
DSWDFTHTTGWFKI

SEQ ID NO: 49897 - protein, 9 aa, synthetic construct
DSTTGWFNI

SEQ ID NO: 49898 - protein, 9 aa, synthetic construct
DSTTGWFKI

SEQ ID NO: 49899 - protein, 9 aa, synthetic construct
DSDTGWFKI

SEQ ID NO: 49900 - protein, 11 aa, synthetic construct
DEWVYTGWLNI

SEQ ID NO: 49901 - protein, 9 aa, synthetic construct
DAWRGLFKI

SEQ ID NO: 49902 - protein, 11 aa, synthetic construct
DEWDKTCWFKI

SEQ ID NO: 49903 - protein, 13 aa, synthetic construct
DAWYPRATGCFKI

SEQ ID NO: 49904 - protein, 9 aa, synthetic construct
DAWWGWLKI

SEQ ID NO: 49905 - protein, 12 aa, synthetic construct
DAWVDTTGWSMI

SEQ ID NO: 49906 - protein, 13 aa, synthetic construct
DAWSPRATGLFKI

SEQ ID NO: 49907 - protein, 13 aa, synthetic construct
DAWSPRAPGWFKI

SEQ ID NO: 49908 - protein, 13 aa, synthetic construct
DAWSHRATGWLKI

SEQ ID NO: 49909 - protein, 12 aa, synthetic construct
SACVDNTGCLKI

SEQ ID NO: 49910 - protein, 9 aa, synthetic construct
SACWCWLKI

SEQ ID NO: 49911 - protein, 12 aa, synthetic construct
SAGDFATGWFKI

SEQ ID NO: 49912 - protein, 13 aa, synthetic construct
SAGDSQNTGWFTI

SEQ ID NO: 49913 - protein, 11 aa, synthetic construct
SSWDYTGWLNI

SEQ ID NO: 49914 - protein, 12 aa, synthetic construct
SSWDYNTCWFKI

SEQ ID NO: 49915 - protein, 13 aa, synthetic construct
SSWDQHTTGWFKI

SEQ ID NO: 49916 - protein, 9 aa, synthetic construct
SSTTGWLKI

SEQ ID NO: 49917 - protein, 9 aa, synthetic construct
SSTTGWFKI

SEQ ID NO: 49918 - protein, 9 aa, synthetic construct
SSNTGWFKI

SEQ ID NO: 49919 - protein, 12 aa, synthetic construct
SSLDYTTGWLKK

SEQ ID NO: 49920 - protein, 13 aa, synthetic construct
SGWESHTTGLFNI

SEQ ID NO: 49921 - protein, 9 aa, synthetic construct
SGWDYYKKL

SEQ ID NO: 49922 - protein, 14 aa, synthetic construct
SGWDYIGATGRLKI

SEQ ID NO: 49923 - protein, 9 aa, synthetic construct
SGNTGLFNI

SEQ ID NO: 49924 - protein, 12 aa, synthetic construct
SEWDYTTGLLKI

SEQ ID NO: 49925 - protein, 13 aa, synthetic construct
SEWDSHTTCWVKI

SEQ ID NO: 49926 - protein, 13 aa, synthetic construct
SEWDQHTPGLFKI

SEQ ID NO: 49927 - protein, 11 aa, synthetic construct
SEWDCTGWFNI

SEQ ID NO: 49928 - protein, 9 aa, synthetic construct
SAWWGWLKI

SEQ ID NO: 49929 - protein, 9 aa, synthetic construct
SAWWGWFNI

SEQ ID NO: 49930 - protein, 12 aa, synthetic construct
SSWDYTTCWFNI

SEQ ID NO: 49931 - protein, 12 aa, synthetic construct
SSWDYTTGWLKI

SEQ ID NO: 49932 - protein, 8 aa, synthetic construct
SSWGCDTT

SEQ ID NO: 49933 - protein, 13 aa, synthetic construct
TVWDSQTTGWFKI

SEQ ID NO: 49934 - protein, 11 aa, synthetic construct
YAWDSNRLLKI

SEQ ID NO: 49935 - protein, 12 aa, synthetic construct
VSWDFGTGWFNI

SEQ ID NO: 49936 - protein, 9 aa, synthetic construct
VAWWGWFKI

SEQ ID NO: 49937 - protein, 12 aa, synthetic construct
VAWDYTTGWFKI

SEQ ID NO: 49938 - protein, 14 aa, synthetic construct
VAWDYEETTGWFKI

SEQ ID NO: 49939 - protein, 11 aa, synthetic construct
VAWDSTGWFKI

SEQ ID NO: 49940 - protein, 12 aa, synthetic construct
VAWAYTTGWFKI

SEQ ID NO: 49941 - protein, 12 aa, synthetic construct
TAWVDTTGWFKI

SEQ ID NO: 49942 - protein, 9 aa, synthetic construct
SSWWGWLKI

SEQ ID NO: 49943 - protein, 13 aa, synthetic construct
TAWSPRATGWFKI

SEQ ID NO: 49944 - protein, 12 aa, synthetic construct
TAWIIIAGWFKI

SEQ ID NO: 49945 - protein, 12 aa, synthetic construct
TAWEYTTGWFKI

SEQ ID NO: 49946 - protein, 13 aa, synthetic construct
TAWDQHTTGWFKI

SEQ ID NO: 49947 - protein, 14 aa, synthetic construct
TAWDLTQTTGWFKK

SEQ ID NO: 49948 - protein, 14 aa, synthetic construct
TAWDFTHTTGWFKI

SEQ ID NO: 49949 - protein, 12 aa, synthetic construct
TAWADTTGWFKI

SEQ ID NO: 49950 - protein, 13 aa, synthetic construct
SAWSPPATGWFKL

SEQ ID NO: 49951 - protein, 9 aa, synthetic construct
SAWGYHKKL

SEQ ID NO: 49952 - protein, 13 aa, synthetic construct
SAWESNTKGWFTI

SEQ ID NO: 49953 - protein, 13 aa, synthetic construct
SAWDCHTHGLFKI

SEQ ID NO: 49954 - protein, 14 aa, synthetic construct
SAWDFTQTTGLFKI

SEQ ID NO: 49955 - protein, 14 aa, synthetic construct
SAWDFTHTTGWFKI

SEQ ID NO: 49956 - protein, 14 aa, synthetic construct
SAWDFTHNTGWFKI

SEQ ID NO: 49957 - protein, 12 aa, synthetic construct
SAWDFATGWVKI

SEQ ID NO: 49958 - protein, 12 aa, synthetic construct
SAWDFATGRFNI

SEQ ID NO: 49959 - protein, 11 aa, synthetic construct
SAWDCSGWFKI

SEQ ID NO: 49960 - protein, 13 aa, synthetic construct
SAWDCHTTGCFKI

SEQ ID NO: 49961 - protein, 13 aa, synthetic construct
SAWDCHNTGWLKI

SEQ ID NO: 49962 - protein, 11 aa, synthetic construct
SAWDPTGWFKI

SEQ ID NO: 49963 - protein, 12 aa, synthetic construct
SARVDTTGWFNI

SEQ ID NO: 49964 - protein, 13 aa, synthetic construct
SARSPRATGWFKI

SEQ ID NO: 49965 - protein, 9 aa, synthetic construct
SARGGWFKI

SEQ ID NO: 49966 - protein, 13 aa, synthetic construct
SARDSHPPGWFKI

SEQ ID NO: 49967 - protein, 12 aa, synthetic construct
SALYYTTGWFKI

SEQ ID NO: 49968 - protein, 11 aa, synthetic construct
SALDCYGWLKI

SEQ ID NO: 49969 - protein, 13 aa, synthetic construct
SAKYYKTTRCFNI

SEQ ID NO: 49970 - protein, 14 aa, synthetic construct
SAWDLTHTTGWLKI

SEQ ID NO: 49971 - protein, 13 aa, synthetic construct
SAWDQHNTGCFKI

SEQ ID NO: 49972 - protein, 9 aa, synthetic construct
SAWDYYKKI

SEQ ID NO: 49973 - protein, 13 aa, synthetic construct
SAWDTHTKGWLKI

SEQ ID NO: 49974 - protein, 12 aa, synthetic construct
SAWDYTTGWLKI

SEQ ID NO: 49975 - protein, 12 aa, synthetic construct
SAWDYTTGCFKI

SEQ ID NO: 49976 - protein, 11 aa, synthetic construct
SAWDYTGWFKI

SEQ ID NO: 49977 - protein, 14 aa, synthetic construct
SAWDYRGYTGLLKI

SEQ ID NO: 49978 - protein, 14 aa, synthetic construct
SAWDYIGDTGWFKI

SEQ ID NO: 49979 - protein, 11 aa, synthetic construct
SAWDWSGWFKR

SEQ ID NO: 49980 - protein, 11 aa, synthetic construct
SAWDTTGWSKI

SEQ ID NO: 49981 - protein, 13 aa, synthetic construct
SAWDSQTTGWFKI

SEQ ID NO: 49982 - protein, 13 aa, synthetic construct
SAWDQHNTGWFKI

SEQ ID NO: 49983 - protein, 13 aa, synthetic construct
SAWDSHTTGLFKI

SEQ ID NO: 49984 - protein, 13 aa, synthetic construct
SAWDSHTPGWFKI

SEQ ID NO: 49985 - protein, 13 aa, synthetic construct
SAWDSHNTGWFKI

SEQ ID NO: 49986 - protein, 13 aa, synthetic construct
SAWDRHTTGWFKI

SEQ ID NO: 49987 - protein, 13 aa, synthetic construct
SAWDQHTTGWFKI

SEQ ID NO: 49988 - protein, 13 aa, synthetic construct
SAWDQHTTGLLKI

SEQ ID NO: 49989 - protein, 13 aa, synthetic construct
SAWDQHTNGWFNI

SEQ ID NO: 49990 - protein, 11 aa, synthetic construct
DAWDRSGWFKI

SEQ ID NO: 49991 - protein, 13 aa, synthetic construct
DAWDQHTTGWFKI

SEQ ID NO: 49992 - protein, 13 aa, synthetic construct
DAWDQHTPGWVKI

SEQ ID NO: 49993 - protein, 9 aa, synthetic construct
ASNTGWYKI

SEQ ID NO: 49994 - protein, 9 aa, synthetic construct
AINTGWFKI

SEQ ID NO: 49995 - protein, 9 aa, synthetic construct
AGWWGWLKI

SEQ ID NO: 49996 - protein, 9 aa, synthetic construct
AGWWGWFKI

SEQ ID NO: 49997 - protein, 13 aa, synthetic construct
AGWESQTTGSYKI

SEQ ID NO: 49998 - protein, 9 aa, synthetic construct
AGWDYYKKL

SEQ ID NO: 49999 - protein, 12 aa, synthetic construct
AGWDYTTGWFNI

SEQ ID NO: 50000 - protein, 13 aa, synthetic construct
AGWDSHTTGWLKI

SEQ ID NO: 50001 - protein, 14 aa, synthetic construct
AGWDFRGATGWLNI

SEQ ID NO: 50002 - protein, 12 aa, synthetic construct
AGWDFATGWFKI

SEQ ID NO: 50003 - protein, 9 aa, synthetic construct
AGWALYKKL

SEQ ID NO: 50004 - protein, 9 aa, synthetic construct
AGTTGWFKI

SEQ ID NO: 50005 - protein, 9 aa, synthetic construct
AGGGCGGGW

SEQ ID NO: 50006 - protein, 11 aa, synthetic construct
AGGETTGWFKL

SEQ ID NO: 50007 - protein, 9 aa, synthetic construct
AEWWGWFNI

SEQ ID NO: 50008 - protein, 9 aa, synthetic construct
AEWGGWFKI

SEQ ID NO: 50009 - protein, 14 aa, synthetic construct
AEWGFTNTTGWLKK

SEQ ID NO: 50010 - protein, 12 aa, synthetic construct
AEWEYTTCWLKI

SEQ ID NO: 50011 - protein, 9 aa, synthetic construct
AITTGLFKI

SEQ ID NO: 50012 - protein, 9 aa, synthetic construct
AITTGWLKI

SEQ ID NO: 50013 - protein, 9 aa, synthetic construct
ANTTGWLKI

SEQ ID NO: 50014 - protein, 9 aa, synthetic construct
ASKTGWFKI

SEQ ID NO: 50015 - protein, 9 aa, synthetic construct
ASNTGWLKI

SEQ ID NO: 50016 - protein, 9 aa, synthetic construct
ASNTGRLNK

SEQ ID NO: 50017 - protein, 9 aa, synthetic construct
ASNTGLFKI

SEQ ID NO: 50018 - protein, 9 aa, synthetic construct
ASNTCWFKI

SEQ ID NO: 50019 - protein, 11 aa, synthetic construct
ASLETTGRFKI

SEQ ID NO: 50020 - protein, 13 aa, synthetic construct
ASLESQSTGWFKI

SEQ ID NO: 50021 - protein, 13 aa, synthetic construct
ASLDSHTTGWFKI

SEQ ID NO: 50022 - protein, 9 aa, synthetic construct
ASHTGWFKI

SEQ ID NO: 50023 - protein, 11 aa, synthetic construct
APWDWSGWFKI

SEQ ID NO: 50024 - protein, 14 aa, synthetic construct
ASFWQLNNTGWLNI

SEQ ID NO: 50025 - protein, 9 aa, synthetic construct
ASATGRVKI

SEQ ID NO: 50026 - protein, 9 aa, synthetic construct
ASATGRLKK

SEQ ID NO: 50027 - protein, 9 aa, synthetic construct
ASATGRFKI

SEQ ID NO: 50028 - protein, 9 aa, synthetic construct
ARTTCWLKI

SEQ ID NO: 50029 - protein, 9 aa, synthetic construct
ARNTGWFKI

SEQ ID NO: 50030 - protein, 12 aa, synthetic construct
APWEYTTGWFKI

SEQ ID NO: 50031 - protein, 11 aa, synthetic construct
AEWEYTCWFKI

SEQ ID NO: 50032 - protein, 13 aa, synthetic construct
AEWEYKTTGWFKI

SEQ ID NO: 50033 - protein, 9 aa, synthetic construct
AEWDYYKKL

SEQ ID NO: 50034 - protein, 9 aa, synthetic construct
AAWWGWLMI

SEQ ID NO: 50035 - protein, 14 aa, synthetic construct
AAWYFTHTTGWFKI

SEQ ID NO: 50036 - protein, 14 aa, synthetic construct
AAWYFTHTNGWFKI

SEQ ID NO: 50037 - protein, 12 aa, synthetic construct
AAWYFATGWFKI

SEQ ID NO: 50038 - protein, 11 aa, synthetic construct
AAWYCSGWFKI

SEQ ID NO: 50039 - protein, 9 aa, synthetic construct
AAWWVWFKI

SEQ ID NO: 50040 - protein, 9 aa, synthetic construct
AAWWGWVKI

SEQ ID NO: 50041 - protein, 9 aa, synthetic construct
AAWWGWLNI

SEQ ID NO: 50042 - protein, 9 aa, synthetic construct
AAWWGWLEI

SEQ ID NO: 50043 - protein, 13 aa, synthetic construct
AAWYPRSTGWFKI

SEQ ID NO: 50044 - protein, 9 aa, synthetic construct
AAWWGWFTV

SEQ ID NO: 50045 - protein, 9 aa, synthetic construct
AAWWGWFRL

SEQ ID NO: 50046 - protein, 8 aa, synthetic construct
AAWWGWFR

SEQ ID NO: 50047 - protein, 9 aa, synthetic construct
AAWWGWFMI

SEQ ID NO: 50048 - protein, 7 aa, synthetic construct
AAWWGWF

SEQ ID NO: 50049 - protein, 9 aa, synthetic construct
AAWWGVFKI

SEQ ID NO: 50050 - protein, 9 aa, synthetic construct
AAWWGLFKK

SEQ ID NO: 50051 - protein, 13 aa, synthetic construct
AAWYPRATGLFKI

SEQ ID NO: 50052 - protein, 13 aa, synthetic construct
AAWYSHTTGWFNI

SEQ ID NO: 50053 - protein, 12 aa, synthetic construct
AEWDYTTGWFKI

SEQ ID NO: 50054 - protein, 11 aa, synthetic construct
AEWDLDCLFNI

SEQ ID NO: 50055 - protein, 12 aa, synthetic construct
AEWDYNTGWFKI

SEQ ID NO: 50056 - protein, 14 aa, synthetic construct
AEWDYEETTGWFKI

SEQ ID NO: 50057 - protein, 11 aa, synthetic construct
AEWDSTGWLNI

SEQ ID NO: 50058 - protein, 13 aa, synthetic construct
AEWDSHTTGWLNI

SEQ ID NO: 50059 - protein, 13 aa, synthetic construct
AEWDQHTTGWFKI

SEQ ID NO: 50060 - protein, 13 aa, synthetic construct
AEWDQHTAGWFKI

SEQ ID NO: 50061 - protein, 14 aa, synthetic construct
AEWDLNHNTAWFNK

SEQ ID NO: 50062 - protein, 14 aa, synthetic construct
AEWDFTHTTGWFKI

SEQ ID NO: 50063 - protein, 11 aa, synthetic construct
AAWYSKGWFKI

SEQ ID NO: 50064 - protein, 14 aa, synthetic construct
AEWDFTHNTGWFNI

SEQ ID NO: 50065 - protein, 11 aa, synthetic construct
AEWAYTGWFKI

SEQ ID NO: 50066 - protein, 12 aa, synthetic construct
AEWADNTGFLKI

SEQ ID NO: 50067 - protein, 12 aa, synthetic construct
AELDYTTGLLKI

SEQ ID NO: 50068 - protein, 11 aa, synthetic construct
AELDYTGWFKI

SEQ ID NO: 50069 - protein, 12 aa, synthetic construct
AEGDYGTGWFKI

SEQ ID NO: 50070 - protein, 14 aa, synthetic construct
AEGDLTHNRGWFNI

SEQ ID NO: 50071 - protein, 9 aa, synthetic construct
ASNTGWLNI

SEQ ID NO: 50072 - protein, 9 aa, synthetic construct
ASNTVWFKI

SEQ ID NO: 50073 - protein, 13 aa, synthetic construct
DAWDQHTPGWFKI

SEQ ID NO: 50074 - protein, 9 aa, synthetic construct
ASPPGWFKI

SEQ ID NO: 50075 - protein, 11 aa, synthetic construct
AVWDSTGWFKI

SEQ ID NO: 50076 - protein, 13 aa, synthetic construct
AVWDSHTTGWLKI

SEQ ID NO: 50077 - protein, 13 aa, synthetic construct
AVWDSHTTGWFTI

SEQ ID NO: 50078 - protein, 13 aa, synthetic construct
AVWDSHTTGRFKI

SEQ ID NO: 50079 - protein, 13 aa, synthetic construct
AVWDCHTKGWLKI

SEQ ID NO: 50080 - protein, 14 aa, synthetic construct
AVGDFTQTTGWFKI

SEQ ID NO: 50081 - protein, 9 aa, synthetic construct
ATWWGWFKI

SEQ ID NO: 50082 - protein, 13 aa, synthetic construct
ATWSPRATGWFKI

SEQ ID NO: 50083 - protein, 12 aa, synthetic construct
ATWEYTTGWFKI

SEQ ID NO: 50084 - protein, 13 aa, synthetic construct
ATWETQTTGWFKK

SEQ ID NO: 50085 - protein, 14 aa, synthetic construct
ATWDYRGATGWFKI

SEQ ID NO: 50086 - protein, 13 aa, synthetic construct
ATWDSHTTGWFEI

SEQ ID NO: 50087 - protein, 12 aa, synthetic construct
ATWDFATGWFKI

SEQ ID NO: 50088 - protein, 14 aa, synthetic construct
ATLDFTHTTGWLKI

SEQ ID NO: 50089 - protein, 12 aa, synthetic construct
ATGDYNTGGLKI

SEQ ID NO: 50090 - protein, 9 aa, synthetic construct
ASWWGLFKI

SEQ ID NO: 50091 - protein, 13 aa, synthetic construct
ASWSTRANCWLKI

SEQ ID NO: 50092 - protein, 14 aa, synthetic construct
AVWDYRGATGWFKI

SEQ ID NO: 50093 - protein, 9 aa, synthetic construct
AVWWGWFKI

SEQ ID NO: 50094 - protein, 14 aa, synthetic construct
AWWDFTHTTGWFKI

SEQ ID NO: 50095 - protein, 13 aa, synthetic construct
DAWAYHTTGWFMI

SEQ ID NO: 50096 - protein, 14 aa, synthetic construct
DAWDFTQTTGWFKI

SEQ ID NO: 50097 - protein, 14 aa, synthetic construct
DAWDFTNTTGWFKI

SEQ ID NO: 50098 - protein, 14 aa, synthetic construct
DAWDFTHTTGWFKI

SEQ ID NO: 50099 - protein, 14 aa, synthetic construct
DAWDFTHNTGWFTI

SEQ ID NO: 50100 - protein, 12 aa, synthetic construct
DAWDFSTGWLKI

SEQ ID NO: 50101 - protein, 12 aa, synthetic construct
DAWDFDTGCFKI

SEQ ID NO: 50102 - protein, 12 aa, synthetic construct
DAWDFATGWLKI

SEQ ID NO: 50103 - protein, 13 aa, synthetic construct
DARDYHTTGWLKI

SEQ ID NO: 50104 - protein, 12 aa, synthetic construct
AWWGFDTGWFKL

SEQ ID NO: 50105 - protein, 13 aa, synthetic construct
DARDYHTTGWFKI

SEQ ID NO: 50106 - protein, 9 aa, synthetic construct
DAGWGWFKI

SEQ ID NO: 50107 - protein, 10 aa, synthetic construct
DAGDYCWFNK

SEQ ID NO: 50108 - protein, 13 aa, synthetic construct
DACSHLANGWFKI

SEQ ID NO: 50109 - protein, 14 aa, synthetic construct
DACDYRGATVCLNI

SEQ ID NO: 50110 - protein, 11 aa, synthetic construct
DACDCNGLLEI

SEQ ID NO: 50111 - protein, 13 aa, synthetic construct
CVGFHSYHWLVQD

SEQ ID NO: 50112 - protein, 13 aa, synthetic construct
ASWSPRATGWSKI

SEQ ID NO: 50113 - protein, 13 aa, synthetic construct
ASWSPRATGWFKI

SEQ ID NO: 50114 - protein, 12 aa, synthetic construct
ASWIIIAGWFKI

SEQ ID NO: 50115 - protein, 9 aa, synthetic construct
ASTTGRFKI

SEQ ID NO: 50116 - protein, 14 aa, synthetic construct
ASWDEIGATGWLKI

SEQ ID NO: 50117 - protein, 11 aa, synthetic construct
ASWDCSGWFKI

SEQ ID NO: 50118 - protein, 12 aa, synthetic construct
ASWANTTGWFKI

SEQ ID NO: 50119 - protein, 9 aa, synthetic construct
ASTTGWYNI

SEQ ID NO: 50120 - protein, 9 aa, synthetic construct
ASTTGWFNI

SEQ ID NO: 50121 - protein, 9 aa, synthetic construct
ASTTGWFKT

SEQ ID NO: 50122 - protein, 9 aa, synthetic construct
ASTTGWFKG

SEQ ID NO: 50123 - protein, 9 aa, synthetic construct
ASTTDWFKI

SEQ ID NO: 50124 - protein, 14 aa, synthetic construct
ASWDFTHNTGLFKI

SEQ ID NO: 50125 - protein, 9 aa, synthetic construct
ASTSGWFKI

SEQ ID NO: 50126 - protein, 9 aa, synthetic construct
ASTPGWLKI

SEQ ID NO: 50127 - protein, 9 aa, synthetic construct
ASTPGLFKI

SEQ ID NO: 50128 - protein, 9 aa, synthetic construct
ASTNGWFKI

SEQ ID NO: 50129 - protein, 9 aa, synthetic construct
ASTAGGLKR

SEQ ID NO: 50130 - protein, 9 aa, synthetic construct
ASSTGWFAL

SEQ ID NO: 50131 - protein, 13 aa, synthetic construct
ASREQQTTGWYNK

SEQ ID NO: 50132 - protein, 12 aa, synthetic construct
ASWDFATGWYKK

SEQ ID NO: 50133 - protein, 14 aa, synthetic construct
ASWDFTHTTGWFKI

SEQ ID NO: 50134 - protein, 9 aa, synthetic construct
ASWGGWFKI

SEQ ID NO: 50135 - protein, 14 aa, synthetic construct
ASWDSTHTTGWFKI

SEQ ID NO: 50136 - protein, 12 aa, synthetic construct
ASWEYTTGWLKI

SEQ ID NO: 50137 - protein, 9 aa, synthetic construct
ASWDYYKKL

SEQ ID NO: 50138 - protein, 14 aa, synthetic construct
ASWDYRGATGWFKI

SEQ ID NO: 50139 - protein, 13 aa, synthetic construct
ASWDYQNNGWFKI

SEQ ID NO: 50140 - protein, 12 aa, synthetic construct
ASWDYNNGWFNI

SEQ ID NO: 50141 - protein, 13 aa, synthetic construct
ASWDYHTTGLFKI

SEQ ID NO: 50142 - protein, 12 aa, synthetic construct
ASWDVATGWFKI

SEQ ID NO: 50143 - protein, 11 aa, synthetic construct
ASWDSTGWLKK

SEQ ID NO: 50144 - protein, 14 aa, synthetic construct
ASWDFTHTTGWLKI

SEQ ID NO: 50145 - protein, 13 aa, synthetic construct
ASWDSQNTGLLKI

SEQ ID NO: 50146 - protein, 13 aa, synthetic construct
ASWDSNTNCLFKI

SEQ ID NO: 50147 - protein, 11 aa, synthetic construct
ASWDSKGWFKI

SEQ ID NO: 50148 - protein, 13 aa, synthetic construct
ASWDSHTTGWLKI

SEQ ID NO: 50149 - protein, 13 aa, synthetic construct
ASWDSHTTCLLKI

SEQ ID NO: 50150 - protein, 12 aa, synthetic construct
ASWDNTTGWFNI

SEQ ID NO: 50151 - protein, 14 aa, synthetic construct
ASWDLNQTTVFFKK

SEQ ID NO: 50152 - protein, 14 aa, synthetic construct
AAWGFTHTTGWLKI

SEQ ID NO: 50153 - skipped

SEQ ID NO: 50154 - protein, 14 aa, synthetic construct
AAWGFTHNTVWFKI

SEQ ID NO: 50155 - protein, 13 aa, synthetic construct
AAWAPRATGWFKM

SEQ ID NO: 50156 - protein, 13 aa, synthetic construct
AAWASPTTGWFTI

SEQ ID NO: 50157 - protein, 13 aa, synthetic construct
AAWASLTTGWFKI

SEQ ID NO: 50158 - protein, 13 aa, synthetic construct
AAWASHTTGWVKI

SEQ ID NO: 50159 - protein, 13 aa, synthetic construct
AAWASHTTGLFKI

SEQ ID NO: 50160 - protein, 13 aa, synthetic construct
AAWAQHTTGFFNI

SEQ ID NO: 50161 - protein, 13 aa, synthetic construct
AAWAQHTPGWFKI

SEQ ID NO: 50162 - protein, 13 aa, synthetic construct
AAWAQDTTGWFKI

SEQ ID NO: 50163 - protein, 9 aa, synthetic construct
AAWAPRATG

SEQ ID NO: 50164 - protein, 11 aa, synthetic construct
AAWASTSWFQI

SEQ ID NO: 50165 - protein, 13 aa, synthetic construct
AAWAPRAPGWGKI

SEQ ID NO: 50166 - protein, 10 aa, synthetic construct
AAWAHGWFKI

SEQ ID NO: 50167 - protein, 10 aa, synthetic construct
AAWAHCWFKI

SEQ ID NO: 50168 - protein, 12 aa, synthetic construct
AAWAGTTGWFKI

SEQ ID NO: 50169 - protein, 8 aa, synthetic construct
AAWAGGGW

SEQ ID NO: 50170 - protein, 14 aa, synthetic construct
AAWAFTQTTGWFKI

SEQ ID NO: 50171 - protein, 12 aa, synthetic construct
AAWAFATGWFKM

SEQ ID NO: 50172 - protein, 13 aa, synthetic construct
AAWASQTTGWFKI

SEQ ID NO: 50173 - protein, 8 aa, synthetic construct
AAWATSAT

SEQ ID NO: 50174 - protein, 14 aa, synthetic construct
AAWAERGAPGWFKI

SEQ ID NO: 50175 - protein, 12 aa, synthetic construct
AAWAYTAGGFQI

SEQ ID NO: 50176 - protein, 14 aa, synthetic construct
AAWDAIGATGWVKI

SEQ ID NO: 50177 - protein, 9 aa, synthetic construct
AAWAYYKEL

SEQ ID NO: 50178 - protein, 12 aa, synthetic construct
AAWAYTTSWFQI

SEQ ID NO: 50179 - protein, 12 aa, synthetic construct
AAWAYTTGWFQI

SEQ ID NO: 50180 - protein, 12 aa, synthetic construct
AAWAYTTGRFKI

SEQ ID NO: 50181 - protein, 12 aa, synthetic construct
AAWAYTPGWFKI

SEQ ID NO: 50182 - protein, 12 aa, synthetic construct
AAWAYTNCWFKI

SEQ ID NO: 50183 - protein, 14 aa, synthetic construct
AAWAYRGATGWFEI

SEQ ID NO: 50184 - protein, 12 aa, synthetic construct
AAWAVATGWFKI

SEQ ID NO: 50185 - protein, 14 aa, synthetic construct
AAWAYRCATGWFEI

SEQ ID NO: 50186 - protein, 12 aa, synthetic construct
AAWAYNRCWFKI

SEQ ID NO: 50187 - protein, 13 aa, synthetic construct
AAWAYHTTGWFKI

SEQ ID NO: 50188 - protein, 14 aa, synthetic construct
AAWAYDETTGWFKI

SEQ ID NO: 50189 - protein, 9 aa, synthetic construct
AAWAYCKKL

SEQ ID NO: 50190 - protein, 11 aa, synthetic construct
AAWAWSGWFKI

SEQ ID NO: 50191 - protein, 12 aa, synthetic construct
AAWAVTTGWFKI

SEQ ID NO: 50192 - protein, 12 aa, synthetic construct
AAWAFATGWFEI

SEQ ID NO: 50193 - protein, 12 aa, synthetic construct
AAWADTTGWYKI

SEQ ID NO: 50194 - protein, 14 aa, synthetic construct
AAWDFTHTTGWLNI

SEQ ID NO: 50195 - protein, 9 aa, synthetic construct
AAVWGWFQK

SEQ ID NO: 50196 - protein, 12 aa, synthetic construct
AAWADATGWFKI

SEQ ID NO: 50197 - protein, 9 aa, synthetic construct
AAWACYKKL

SEQ ID NO: 50198 - protein, 11 aa, synthetic construct
AAWACTGWFQI

SEQ ID NO: 50199 - protein, 11 aa, synthetic construct
AAWACTGWFLI

SEQ ID NO: 50200 - protein, 11 aa, synthetic construct
AAWACTGWFKI

SEQ ID NO: 50201 - protein, 11 aa, synthetic construct
AAWACSGWLKI

SEQ ID NO: 50202 - protein, 11 aa, synthetic construct
AAVYNTGWFKI

SEQ ID NO: 50203 - protein, 12 aa, synthetic construct
AAVVDTTGWFKI

SEQ ID NO: 50204 - protein, 12 aa, synthetic construct
AAWADPTGWFKI

SEQ ID NO: 50205 - protein, 12 aa, synthetic construct
AAVVDNTGWFNI

SEQ ID NO: 50206 - protein, 9 aa, synthetic construct
AAVDYYKKL

SEQ ID NO: 50207 - protein, 12 aa, synthetic construct
AAVDYTTGWFQI

SEQ ID NO: 50208 - protein, 11 aa, synthetic construct
AAVDYTGWFKI

SEQ ID NO: 50209 - protein, 13 aa, synthetic construct
AAVDSNNTGWVKI

SEQ ID NO: 50210 - protein, 13 aa, synthetic construct
AAVDSHTPGWFKI

SEQ ID NO: 50211 - protein, 14 aa, synthetic construct
AAVDFTHTTGWFKI

SEQ ID NO: 50212 - protein, 12 aa, synthetic construct
AAWADKTGWLKI

SEQ ID NO: 50213 - protein, 12 aa, synthetic construct
AAWADPTGWVQI

SEQ ID NO: 50214 - protein, 12 aa, synthetic construct
AAWADTTGWSKI

SEQ ID NO: 50215 - protein, 8 aa, synthetic construct
AAWADTTG

SEQ ID NO: 50216 - protein, 12 aa, synthetic construct
AAWADTTGWFRI

SEQ ID NO: 50217 - protein, 12 aa, synthetic construct
AAWADTTGWFKT

SEQ ID NO: 50218 - protein, 12 aa, synthetic construct
AAWADTTGWFKR

SEQ ID NO: 50219 - protein, 12 aa, synthetic construct
AAWADTTGWFEI

SEQ ID NO: 50220 - protein, 12 aa, synthetic construct
AAWADTTGLLKI

SEQ ID NO: 50221 - protein, 12 aa, synthetic construct
AAWADTTGLFKI

SEQ ID NO: 50222 - protein, 12 aa, synthetic construct
AAWADTTGGFKI

SEQ ID NO: 50223 - protein, 12 aa, synthetic construct
AAWADTTCWFKI

SEQ ID NO: 50224 - protein, 14 aa, synthetic construct
AAWADRGAPGWCKR

SEQ ID NO: 50225 - protein, 12 aa, synthetic construct
AAWADTNGWFKI

SEQ ID NO: 50226 - protein, 12 aa, synthetic construct
AAWADTIGWFKI

SEQ ID NO: 50227 - protein, 12 aa, synthetic construct
AAWADTAGWFKI

SEQ ID NO: 50228 - protein, 14 aa, synthetic construct
AAWADRGATGWFMI

SEQ ID NO: 50229 - protein, 14 aa, synthetic construct
AAWADRGATGWFKK

SEQ ID NO: 50230 - protein, 14 aa, synthetic construct
AAWADRGATGWFKI

SEQ ID NO: 50231 - protein, 14 aa, synthetic construct
AAWADRGATACFKI

SEQ ID NO: 50232 - protein, 11 aa, synthetic construct
AAWDAPGWFQI

SEQ ID NO: 50233 - protein, 13 aa, synthetic construct
AAWDAQTTGWVKI

SEQ ID NO: 50234 - protein, 11 aa, synthetic construct
AAWDCAGWFKI

SEQ ID NO: 50235 - protein, 12 aa, synthetic construct
AAWDFGTGLFKI

SEQ ID NO: 50236 - protein, 14 aa, synthetic construct
AAWDFRGATGWLKI

SEQ ID NO: 50237 - protein, 14 aa, synthetic construct
AAWDFPHTTGWFKI

SEQ ID NO: 50238 - protein, 14 aa, synthetic construct
AAWDFNHTTFWFKI

SEQ ID NO: 50239 - protein, 14 aa, synthetic construct
AAWDFNHNTGWLKI

SEQ ID NO: 50240 - protein, 14 aa, synthetic construct
AAWDFKNNKGWFKK

SEQ ID NO: 50241 - protein, 14 aa, synthetic construct
AAWDFIHTTGWSKI

SEQ ID NO: 50242 - protein, 12 aa, synthetic construct
AAWDFGTGWFKI

SEQ ID NO: 50243 - protein, 12 aa, synthetic construct
AAWDFDTGWLKI

SEQ ID NO: 50244 - protein, 14 aa, synthetic construct
AAWDFSHTTGWFKI

SEQ ID NO: 50245 - protein, 12 aa, synthetic construct
AAWDFDTCWFKI

SEQ ID NO: 50246 - protein, 12 aa, synthetic construct
AAWDFDKVLLKI

SEQ ID NO: 50247 - protein, 9 aa, synthetic construct
AAWDFCKKL

SEQ ID NO: 50248 - protein, 12 aa, synthetic construct
AAWDFATVWLKI

SEQ ID NO: 50249 - protein, 12 aa, synthetic construct
AAWDFATGWYKI

SEQ ID NO: 50250 - protein, 12 aa, synthetic construct
AAWDFATGWVKI

SEQ ID NO: 50251 - protein, 12 aa, synthetic construct
AAWDFATGWLNI

SEQ ID NO: 50252 - protein, 11 aa, synthetic construct
AAWDFSGWLKI

SEQ ID NO: 50253 - protein, 12 aa, synthetic construct
AAWDFSTGWFNI

SEQ ID NO: 50254 - protein, 9 aa, synthetic construct
AAWDCHKKL

SEQ ID NO: 50255 - protein, 9 aa, synthetic construct
AAWDFTHTT

SEQ ID NO: 50256 - protein, 14 aa, synthetic construct
AAWDFTHTTGWFRM

SEQ ID NO: 50257 - protein, 14 aa, synthetic construct
AAWDFTHTTGWFRI

SEQ ID NO: 50258 - protein, 13 aa, synthetic construct
AAWDFTHTTGWFK

SEQ ID NO: 50259 - protein, 14 aa, synthetic construct
AAWDFTHTTGRLKI

SEQ ID NO: 50260 - protein, 14 aa, synthetic construct
AAWDFTHTTGGFKI

SEQ ID NO: 50261 - protein, 14 aa, synthetic construct
AAWDFTHTTGCLKI

SEQ ID NO: 50262 - protein, 14 aa, synthetic construct
AAWDFTHTTDWFKI

SEQ ID NO: 50263 - protein, 14 aa, synthetic construct
AAWDFTHTSGWFKK

SEQ ID NO: 50264 - protein, 12 aa, synthetic construct
AAWDFSTGWLKI

SEQ ID NO: 50265 - protein, 14 aa, synthetic construct
AAWDFTHTAGWLKI

SEQ ID NO: 50266 - protein, 14 aa, synthetic construct
AAWDFTHSTGWFKI

SEQ ID NO: 50267 - protein, 14 aa, synthetic construct
AAWDFTHPTGWFKI

SEQ ID NO: 50268 - protein, 14 aa, synthetic construct
AAWDFTHNTRWFKI

SEQ ID NO: 50269 - protein, 14 aa, synthetic construct
AAWDFTHITGWFKI

SEQ ID NO: 50270 - protein, 14 aa, synthetic construct
AAWDFTHATGWFKI

SEQ ID NO: 50271 - protein, 11 aa, synthetic construct
AAWDFTGLFKI

SEQ ID NO: 50272 - protein, 12 aa, synthetic construct
AAWDFATGWFTI

SEQ ID NO: 50273 - protein, 12 aa, synthetic construct
AAWDFATGWFRI

SEQ ID NO: 50274 - protein, 12 aa, synthetic construct
AAWDFATGWFQI

SEQ ID NO: 50275 - protein, 11 aa, synthetic construct
AAWDCSGWFTI

SEQ ID NO: 50276 - protein, 11 aa, synthetic construct
AAWDCTGWVKI

SEQ ID NO: 50277 - protein, 11 aa, synthetic construct
AAWDCTGWLKV

SEQ ID NO: 50278 - protein, 11 aa, synthetic construct
AAWDCTGWFTI

SEQ ID NO: 50279 - protein, 11 aa, synthetic construct
AAWDCTGCFKI

SEQ ID NO: 50280 - protein, 11 aa, synthetic construct
AAWDCTCWFKI

SEQ ID NO: 50281 - protein, 11 aa, synthetic construct
AAWDCSGWVKI

SEQ ID NO: 50282 - protein, 11 aa, synthetic construct
AAWDCSGWSKI

SEQ ID NO: 50283 - protein, 11 aa, synthetic construct
AAWDCSGWFKR

SEQ ID NO: 50284 - protein, 12 aa, synthetic construct
AAWDFATGWFMI

SEQ ID NO: 50285 - protein, 11 aa, synthetic construct
AAWDCSGWFEI

SEQ ID NO: 50286 - protein, 11 aa, synthetic construct
AAWDCSGWCTI

SEQ ID NO: 50287 - protein, 11 aa, synthetic construct
AAWDCSGLFKM

SEQ ID NO: 50288 - protein, 14 aa, synthetic construct
AAWDCRGATGWFTI

SEQ ID NO: 50289 - protein, 13 aa, synthetic construct
AAWDCQNTGLFNI

SEQ ID NO: 50290 - protein, 11 aa, synthetic construct
AAWDCNGWVKI

SEQ ID NO: 50291 - protein, 12 aa, synthetic construct
AAWDCHTTVGSR

SEQ ID NO: 50292 - protein, 11 aa, synthetic construct
AAWDCTSWFKI

SEQ ID NO: 50293 - protein, 12 aa, synthetic construct
AAWDCTTGWFKI

SEQ ID NO: 50294 - protein, 12 aa, synthetic construct
AAWDCTTGWLKI

SEQ ID NO: 50295 - protein, 13 aa, synthetic construct
AAWDCVPTGWFKI

SEQ ID NO: 50296 - protein, 12 aa, synthetic construct
AAWDFATGGLKI

SEQ ID NO: 50297 - protein, 12 aa, synthetic construct
AAWDFATGGFKI

SEQ ID NO: 50298 - protein, 12 aa, synthetic construct
AAWDFATCWVKI

SEQ ID NO: 50299 - protein, 12 aa, synthetic construct
AAWDFATCWLNI

SEQ ID NO: 50300 - protein, 12 aa, synthetic construct
AAWDFATCLLKI

SEQ ID NO: 50301 - protein, 12 aa, synthetic construct
AAWDFATCCFKI

SEQ ID NO: 50302 - protein, 12 aa, synthetic construct
AAWDFATAWFNI

SEQ ID NO: 50303 - protein, 12 aa, synthetic construct
AAWDFAIGWFKI

SEQ ID NO: 50304 - protein, 14 aa, synthetic construct
AAWDFAHTIGWFKI

SEQ ID NO: 50305 - protein, 13 aa, synthetic construct
AAWDENTPGWLKI

SEQ ID NO: 50306 - protein, 9 aa, synthetic construct
AAWDDYKKL

SEQ ID NO: 50307 - protein, 14 aa, synthetic construct
AAWDDRGATGWLNI

SEQ ID NO: 50308 - protein, 12 aa, synthetic construct
AAWDDKKGWFQL

SEQ ID NO: 50309 - protein, 9 aa, synthetic construct
AAWDDHKKL

SEQ ID NO: 50310 - protein, 12 aa, synthetic construct
AAWDDGTGWFKI

SEQ ID NO: 50311 - protein, 13 aa, synthetic construct
AASSPRATGWFKI

SEQ ID NO: 50312 - protein, 13 aa, synthetic construct
AASDSQTTGWFNK

SEQ ID NO: 50313 - protein, 13 aa, synthetic construct
AASDQHTTGWFNK

SEQ ID NO: 50314 - protein, 13 aa, synthetic construct
AAGDQRTTGWFKR

SEQ ID NO: 50315 - protein, 12 aa, synthetic construct
AAGDSTTGWFKI

SEQ ID NO: 50316 - protein, 14 aa, synthetic construct
AAGDSTQTTGGVKI

SEQ ID NO: 50317 - protein, 11 aa, synthetic construct
AAGDSTGGVKI

SEQ ID NO: 50318 - protein, 13 aa, synthetic construct
AAGDSQTTRWCKI

SEQ ID NO: 50319 - protein, 13 aa, synthetic construct
AAGDSHTTGWVKI

SEQ ID NO: 50320 - protein, 12 aa, synthetic construct
AAGDSGHCWFKI

SEQ ID NO: 50321 - protein, 13 aa, synthetic construct
AAGDRHTTGWFKV

SEQ ID NO: 50322 - protein, 13 aa, synthetic construct
AAGDQHTPGWVKI

SEQ ID NO: 50323 - protein, 11 aa, synthetic construct
AAGDTTGWLKI

SEQ ID NO: 50324 - protein, 14 aa, synthetic construct
AAGDLTHTTGWFKI

SEQ ID NO: 50325 - protein, 14 aa, synthetic construct
AAGDITQTKGWFNI

SEQ ID NO: 50326 - protein, 14 aa, synthetic construct
AAGDFTPTPRWFKL

SEQ ID NO: 50327 - protein, 14 aa, synthetic construct
AAGDFTHTTVLLKI

SEQ ID NO: 50328 - protein, 14 aa, synthetic construct
AAGDFTHTTGWLKI

SEQ ID NO: 50329 - protein, 14 aa, synthetic construct
AAGDFTHTTGWFKK

SEQ ID NO: 50330 - protein, 14 aa, synthetic construct
AAGDFTHTPGWFKI

SEQ ID NO: 50331 - protein, 11 aa, synthetic construct
AAGDTPGWFKI

SEQ ID NO: 50332 - protein, 14 aa, synthetic construct
AAGDVTQTTGGFKI

SEQ ID NO: 50333 - protein, 13 aa, synthetic construct
AAGESHTPGWFKI

SEQ ID NO: 50334 - protein, 12 aa, synthetic construct
AAGDYTTGWFQI

SEQ ID NO: 50335 - protein, 14 aa, synthetic construct
AAGEFTHTTGWFKI

SEQ ID NO: 50336 - protein, 12 aa, synthetic construct
AAGEFSTGWLKI

SEQ ID NO: 50337 - protein, 12 aa, synthetic construct
AAGEFATGWFKI

SEQ ID NO: 50338 - protein, 11 aa, synthetic construct
AAGECTGWFKI

SEQ ID NO: 50339 - protein, 9 aa, synthetic construct
AAGDYYKKI

SEQ ID NO: 50340 - protein, 12 aa, synthetic construct
AAGDYTTGWVTI

SEQ ID NO: 50341 - protein, 12 aa, synthetic construct
AAGDYTTGWVKI

SEQ ID NO: 50342 - protein, 12 aa, synthetic construct
AAGDYTTGGFKI

SEQ ID NO: 50343 - protein, 11 aa, synthetic construct
AAGDWTGGGKR

SEQ ID NO: 50344 - protein, 14 aa, synthetic construct
AAGDYRGTTGWFKI

SEQ ID NO: 50345 - protein, 12 aa, synthetic construct
AAGDYNTGWFKI

SEQ ID NO: 50346 - protein, 14 aa, synthetic construct
AAGDYIGATGWFKL

SEQ ID NO: 50347 - protein, 13 aa, synthetic construct
AAGDYHTTGWFKI

SEQ ID NO: 50348 - protein, 13 aa, synthetic construct
AAGDYHNTGWFKI

SEQ ID NO: 50349 - protein, 14 aa, synthetic construct
AAGDYEETTGWFKI

SEQ ID NO: 50350 - protein, 14 aa, synthetic construct
AAGDWTHTTGWFKM

SEQ ID NO: 50351 - protein, 12 aa, synthetic construct
AAGDFSTGWFKI

SEQ ID NO: 50352 - protein, 14 aa, synthetic construct
AAGDFNHTTGWLKI

SEQ ID NO: 50353 - protein, 11 aa, synthetic construct
AAGDFNGWFNI

SEQ ID NO: 50354 - protein, 14 aa, synthetic construct
AACDYRGATGWFKL

SEQ ID NO: 50355 - protein, 9 aa, synthetic construct
AACWGLFKI

SEQ ID NO: 50356 - protein, 12 aa, synthetic construct
AACVDTTGWFNI

SEQ ID NO: 50357 - protein, 12 aa, synthetic construct
AACVDTNGLFKI

SEQ ID NO: 50358 - protein, 13 aa, synthetic construct
AACSPRATGWFMI

SEQ ID NO: 50359 - protein, 13 aa, synthetic construct
AACESHTNWLLNI

SEQ ID NO: 50360 - protein, 9 aa, synthetic construct
AACDYYNKH

SEQ ID NO: 50361 - protein, 11 aa, synthetic construct
AACDYTGWSKI

SEQ ID NO: 50362 - protein, 11 aa, synthetic construct
AACDSTGWFKL

SEQ ID NO: 50363 - protein, 11 aa, synthetic construct
AAGDFCGLLKI

SEQ ID NO: 50364 - protein, 13 aa, synthetic construct
AACDSHTTGLFNI

SEQ ID NO: 50365 - protein, 13 aa, synthetic construct
AACDSHTTGLFKI

SEQ ID NO: 50366 - protein, 14 aa, synthetic construct
AACDFTHTTGWFKV

SEQ ID NO: 50367 - protein, 12 aa, synthetic construct
AACDFATGWLKI

SEQ ID NO: 50368 - protein, 11 aa, synthetic construct
AACDCTGWLKI

SEQ ID NO: 50369 - protein, 11 aa, synthetic construct
AACDCTGWFKI

SEQ ID NO: 50370 - protein, 11 aa, synthetic construct
AACDCSGWFKI

SEQ ID NO: 50371 - protein, 10 aa, synthetic construct
AADTTGWFKI

SEQ ID NO: 50372 - protein, 12 aa, synthetic construct
AAFDFATGWFKI

SEQ ID NO: 50373 - protein, 11 aa, synthetic construct
AAFDTTGWFKI

SEQ ID NO: 50374 - protein, 14 aa, synthetic construct
AAFWQCNNTGWFKI

SEQ ID NO: 50375 - protein, 12 aa, synthetic construct
AAGDFATGWFTI

SEQ ID NO: 50376 - protein, 12 aa, synthetic construct
AAGDFATGWFQI

SEQ ID NO: 50377 - protein, 11 aa, synthetic construct
AAGDCPGWFKM

SEQ ID NO: 50378 - protein, 12 aa, synthetic construct
AAGAVATGWVQI

SEQ ID NO: 50379 - protein, 11 aa, synthetic construct
AAGASTGWFQI

SEQ ID NO: 50380 - protein, 13 aa, synthetic construct
AAGASRTKGWCKI

SEQ ID NO: 50381 - protein, 13 aa, synthetic construct
AAGASHTTGWFRI

SEQ ID NO: 50382 - protein, 13 aa, synthetic construct
AAGASHTTGWFKI

SEQ ID NO: 50383 - protein, 13 aa, synthetic construct
AAGAQHTTGWFKI

SEQ ID NO: 50384 - protein, 14 aa, synthetic construct
AAGAFTHTTGWFKI

SEQ ID NO: 50385 - protein, 9 aa, synthetic construct
AAGAEYKKL

SEQ ID NO: 50386 - protein, 12 aa, synthetic construct
AAGADTPGWLKI

SEQ ID NO: 50387 - protein, 12 aa, synthetic construct
AAGADTPGWFKR

SEQ ID NO: 50388 - protein, 14 aa, synthetic construct
AAFWQWNTTGWFKI

SEQ ID NO: 50389 - protein, 14 aa, synthetic construct
AAFWQWNNTGWFNI

SEQ ID NO: 50390 - protein, 14 aa, synthetic construct
AAGEFTQTTGLFQR

SEQ ID NO: 50391 - protein, 13 aa, synthetic construct
AAGESHTTGGFKI

SEQ ID NO: 50392 - protein, 10 aa, synthetic construct
AASATGWFKI

SEQ ID NO: 50393 - protein, 13 aa, synthetic construct
AALSHRATGWFKI

SEQ ID NO: 50394 - protein, 12 aa, synthetic construct
AARDFATGWYKK

SEQ ID NO: 50395 - protein, 14 aa, synthetic construct
AARDFAHTTGWFKI

SEQ ID NO: 50396 - protein, 11 aa, synthetic construct
AARDAPGGCKE

SEQ ID NO: 50397 - protein, 9 aa, synthetic construct
AALWGWLKI

SEQ ID NO: 50398 - protein, 9 aa, synthetic construct
AALWGRFKI

SEQ ID NO: 50399 - protein, 13 aa, synthetic construct
AALVSHTTGWFKI

SEQ ID NO: 50400 - protein, 13 aa, synthetic construct
AALSPRATRWFKK

SEQ ID NO: 50401 - protein, 12 aa, synthetic construct
AALIIIAGWFKI

SEQ ID NO: 50402 - protein, 13 aa, synthetic construct
AARDQHTTGWFNI

SEQ ID NO: 50403 - protein, 12 aa, synthetic construct
AALGFGTGWFKI

SEQ ID NO: 50404 - protein, 9 aa, synthetic construct
AALDYYKKQ

SEQ ID NO: 50405 - protein, 12 aa, synthetic construct
AALDYTTVRFKI

SEQ ID NO: 50406 - protein, 12 aa, synthetic construct
AALDYTTSWFKI

SEQ ID NO: 50407 - protein, 14 aa, synthetic construct
AALDYRGATGWFNI

SEQ ID NO: 50408 - protein, 14 aa, synthetic construct
AALDYRGAPGWFKI

SEQ ID NO: 50409 - protein, 14 aa, synthetic construct
AALDYRAATGWLKI

SEQ ID NO: 50410 - protein, 11 aa, synthetic construct
AARDNTGLFKI

SEQ ID NO: 50411 - protein, 10 aa, synthetic construct
AARDSCWFKI

SEQ ID NO: 50412 - protein, 13 aa, synthetic construct
AAGESHTTGWFEI

SEQ ID NO: 50413 - protein, 12 aa, synthetic construct
AAREYTTGWFKI

SEQ ID NO: 50414 - protein, 13 aa, synthetic construct
AARYPRATGWLKI

SEQ ID NO: 50415 - protein, 9 aa, synthetic construct
AARWGWYKI

SEQ ID NO: 50416 - protein, 9 aa, synthetic construct
AARWGWFKK

SEQ ID NO: 50417 - protein, 9 aa, synthetic construct
AARWGWFKI

SEQ ID NO: 50418 - protein, 12 aa, synthetic construct
AARVDTTGWFNI

SEQ ID NO: 50419 - protein, 12 aa, synthetic construct
AARVDTKVRFKI

SEQ ID NO: 50420 - protein, 13 aa, synthetic construct
AARSPRATGWFNI

SEQ ID NO: 50421 - protein, 13 aa, synthetic construct
AARDYQTTGLFKI

SEQ ID NO: 50422 - protein, 13 aa, synthetic construct
AARDSHTKGWLKI

SEQ ID NO: 50423 - protein, 14 aa, synthetic construct
AARDYIGATGWFKI

SEQ ID NO: 50424 - protein, 11 aa, synthetic construct
AARDTTGWFKI

SEQ ID NO: 50425 - protein, 13 aa, synthetic construct
AARDSQTTAWFKI

SEQ ID NO: 50426 - protein, 11 aa, synthetic construct
AARDSPGWFKI

SEQ ID NO: 50427 - protein, 13 aa, synthetic construct
AARDSHTTGWLKI

SEQ ID NO: 50428 - protein, 13 aa, synthetic construct
AARDSHTTGWFRI

SEQ ID NO: 50429 - protein, 13 aa, synthetic construct
AARDSHTTGLFKI

SEQ ID NO: 50430 - protein, 12 aa, synthetic construct
AALDYNTGWFKI

SEQ ID NO: 50431 - protein, 13 aa, synthetic construct
AALDYHTTGWFKI

SEQ ID NO: 50432 - protein, 13 aa, synthetic construct
AALDYHNNGWLKI

SEQ ID NO: 50433 - protein, 12 aa, synthetic construct
AAGGYTTGWFKI

SEQ ID NO: 50434 - protein, 9 aa, synthetic construct
AAGWGWLNI

SEQ ID NO: 50435 - protein, 9 aa, synthetic construct
AAGWGWFKV

SEQ ID NO: 50436 - protein, 12 aa, synthetic construct
AAGVHTTGWFKI

SEQ ID NO: 50437 - protein, 12 aa, synthetic construct
AAGVDTTGGFTI

SEQ ID NO: 50438 - protein, 13 aa, synthetic construct
AAGSPRATRWFKI

SEQ ID NO: 50439 - protein, 13 aa, synthetic construct
AAGSPRATGWFKI

SEQ ID NO: 50440 - protein, 13 aa, synthetic construct
AAGPPPATGWFKI

SEQ ID NO: 50441 - protein, 13 aa, synthetic construct
AAGGSPTTGWVKI

SEQ ID NO: 50442 - protein, 9 aa, synthetic construct
AALDYHKKL

SEQ ID NO: 50443 - protein, 13 aa, synthetic construct
AAGGSHTTGWFKI

SEQ ID NO: 50444 - protein, 13 aa, synthetic construct
AAGGSHTTGGFKI

SEQ ID NO: 50445 - protein, 12 aa, synthetic construct
AAGGLSTGWFKI

SEQ ID NO: 50446 - protein, 9 aa, synthetic construct
AAGGGWFQI

SEQ ID NO: 50447 - protein, 12 aa, synthetic construct
AAGGDNTCWVKI

SEQ ID NO: 50448 - protein, 14 aa, synthetic construct
AAGEYRGAPGWFKI

SEQ ID NO: 50449 - protein, 11 aa, synthetic construct
AAGESTGWAKI

SEQ ID NO: 50450 - protein, 13 aa, synthetic construct
AAGYQPTTGWVKI

SEQ ID NO: 50451 - protein, 12 aa, synthetic construct
AALADTTGWFKI

SEQ ID NO: 50452 - protein, 11 aa, synthetic construct
AALDCSCWFKI

SEQ ID NO: 50453 - protein, 11 aa, synthetic construct
AALDCTGWFKI

SEQ ID NO: 50454 - protein, 9 aa, synthetic construct
AALDYFKKL

SEQ ID NO: 50455 - protein, 14 aa, synthetic construct
AALDYEETAGWFKI

SEQ ID NO: 50456 - protein, 14 aa, synthetic construct
AALDYDETTGWFKI

SEQ ID NO: 50457 - protein, 11 aa, synthetic construct
AALDTTVLFKI

SEQ ID NO: 50458 - protein, 11 aa, synthetic construct
AALDSTGWVKI

SEQ ID NO: 50459 - protein, 11 aa, synthetic construct
AALDSTGLFKI

SEQ ID NO: 50460 - protein, 13 aa, synthetic construct
AALDSHTTGWLNI

SEQ ID NO: 50461 - protein, 13 aa, synthetic construct
AALDQHTTGWFKV

SEQ ID NO: 50462 - protein, 13 aa, synthetic construct
AALDQHTTGRFKI

SEQ ID NO: 50463 - protein, 13 aa, synthetic construct
AALDQHNNGWFKI

SEQ ID NO: 50464 - protein, 14 aa, synthetic construct
AALDLTHTTGWFKI

SEQ ID NO: 50465 - protein, 14 aa, synthetic construct
AALDFTHTTGWSKI

SEQ ID NO: 50466 - protein, 14 aa, synthetic construct
AALDFTHTTGLFKI

SEQ ID NO: 50467 - protein, 12 aa, synthetic construct
AALDFATGRFKI

SEQ ID NO: 50468 - protein, 12 aa, synthetic construct
AALDEATGWFKI

SEQ ID NO: 50469 - protein, 14 aa, synthetic construct
AAWDFTHTTGWFTI

SEQ ID NO: 50470 - protein, 14 aa, synthetic construct
AAWDFTHTTGWLNK

SEQ ID NO: 50471 - protein, 11 aa, synthetic construct
AAWGFSGWFKI

SEQ ID NO: 50472 - protein, 14 aa, synthetic construct
AAWDYRGATGGFKI

SEQ ID NO: 50473 - protein, 14 aa, synthetic construct
AAWDYRGATGWFQI

SEQ ID NO: 50474 - protein, 14 aa, synthetic construct
AAWDYRGATGWFMI

SEQ ID NO: 50475 - protein, 14 aa, synthetic construct
AAWDYRGATGWFKV

SEQ ID NO: 50476 - protein, 14 aa, synthetic construct
AAWDYRGATGWFKT

SEQ ID NO: 50477 - protein, 11 aa, synthetic construct
AAWDYRGATGW

SEQ ID NO: 50478 - protein, 14 aa, synthetic construct
AAWDYRGATGRLKI

SEQ ID NO: 50479 - protein, 14 aa, synthetic construct
AAWDYRGATGLLKI

SEQ ID NO: 50480 - protein, 14 aa, synthetic construct
AAWDYRGATGCFKI

SEQ ID NO: 50481 - protein, 14 aa, synthetic construct
AAWDYRGATGWYKI

SEQ ID NO: 50482 - protein, 14 aa, synthetic construct
AAWDYRGATDWFKI

SEQ ID NO: 50483 - protein, 14 aa, synthetic construct
AAWDYRGAPGWFRI

SEQ ID NO: 50484 - protein, 14 aa, synthetic construct
AAWDYRGANGWFKI

SEQ ID NO: 50485 - protein, 14 aa, synthetic construct
AAWDYREATGWFKI

SEQ ID NO: 50486 - protein, 13 aa, synthetic construct
AAWDYRDTGWFKI

SEQ ID NO: 50487 - protein, 13 aa, synthetic construct
AAWDYQNTGWFKI

SEQ ID NO: 50488 - protein, 12 aa, synthetic construct
AAWDYNTVWLKI

SEQ ID NO: 50489 - protein, 14 aa, synthetic construct
AAWDYRGATGWIKI

SEQ ID NO: 50490 - protein, 14 aa, synthetic construct
AAWDYRGATVLLKI

SEQ ID NO: 50491 - protein, 11 aa, synthetic construct
AAAGGGHYKKL

SEQ ID NO: 50492 - protein, 12 aa, synthetic construct
AAWDYTPVWFKI

SEQ ID NO: 50493 - protein, 12 aa, synthetic construct
AAWDYTTGWCKI

SEQ ID NO: 50494 - protein, 9 aa, synthetic construct
AAWDYTTGW

SEQ ID NO: 50495 - protein, 12 aa, synthetic construct
AAWDYTTGCFKI

SEQ ID NO: 50496 - protein, 12 aa, synthetic construct
AAWDYTTDWFKI

SEQ ID NO: 50497 - protein, 12 aa, synthetic construct
AAWDYTTAWFKI

SEQ ID NO: 50498 - protein, 11 aa, synthetic construct
AAWDYTRWFKL

SEQ ID NO: 50499 - protein, 12 aa, synthetic construct
AAWDYTQGWFKI

SEQ ID NO: 50500 - protein, 11 aa, synthetic construct
AAWDYTLWFKK

SEQ ID NO: 50501 - protein, 14 aa, synthetic construct
AAWDYRGDTGWFKI

SEQ ID NO: 50502 - protein, 11 aa, synthetic construct
AAWDYTGWFRI

SEQ ID NO: 50503 - protein, 11 aa, synthetic construct
AAWDYTGWFQI

SEQ ID NO: 50504 - protein, 11 aa, synthetic construct
AAWDYTGLFKI

SEQ ID NO: 50505 - protein, 12 aa, synthetic construct
AAWDYTAGWFKI

SEQ ID NO: 50506 - protein, 14 aa, synthetic construct
AAWDYRVATGLFEI

SEQ ID NO: 50507 - protein, 14 aa, synthetic construct
AAWDYRGVTGWFKI

SEQ ID NO: 50508 - protein, 14 aa, synthetic construct
AAWDYRGSTGWFNI

SEQ ID NO: 50509 - protein, 13 aa, synthetic construct
AAWDYNTTGWFKI

SEQ ID NO: 50510 - protein, 12 aa, synthetic construct
AAWDYNTGWFMI

SEQ ID NO: 50511 - protein, 14 aa, synthetic construct
AAWDFTHTTGWVKI

SEQ ID NO: 50512 - protein, 14 aa, synthetic construct
AAWDYGGATGWFKI

SEQ ID NO: 50513 - protein, 13 aa, synthetic construct
AAWDYHTTCWFKI

SEQ ID NO: 50514 - protein, 13 aa, synthetic construct
AAWDYHTNGWFKI

SEQ ID NO: 50515 - protein, 13 aa, synthetic construct
AAWDYHTNGLLKI

SEQ ID NO: 50516 - protein, 13 aa, synthetic construct
AAWDYHTAGWFKI

SEQ ID NO: 50517 - protein, 13 aa, synthetic construct
AAWDYHNTGWSNI

SEQ ID NO: 50518 - protein, 13 aa, synthetic construct
AAWDYHNTGLFNI

SEQ ID NO: 50519 - protein, 9 aa, synthetic construct
AAWDYHNKL

SEQ ID NO: 50520 - protein, 14 aa, synthetic construct
AAWDYEETTGWSKI

SEQ ID NO: 50521 - protein, 13 aa, synthetic construct
AAWDYHTTGLLKI

SEQ ID NO: 50522 - protein, 14 aa, synthetic construct
AAWDYEETTGWFRI

SEQ ID NO: 50523 - protein, 14 aa, synthetic construct
AAWDYEETTGRFKI

SEQ ID NO: 50524 - protein, 14 aa, synthetic construct
AAWDYEETTGGFKI

SEQ ID NO: 50525 - protein, 10 aa, synthetic construct
AAWDYEETTG

SEQ ID NO: 50526 - protein, 14 aa, synthetic construct
AAWDYEETTCWFKI

SEQ ID NO: 50527 - protein, 14 aa, synthetic construct
AAWDYEETPGWFKI

SEQ ID NO: 50528 - protein, 14 aa, synthetic construct
AAWDYEETNGWFNI

SEQ ID NO: 50529 - protein, 13 aa, synthetic construct
AAWDYHTTGCFKI

SEQ ID NO: 50530 - protein, 13 aa, synthetic construct
AAWDYHTTGWFKV

SEQ ID NO: 50531 - protein, 12 aa, synthetic construct
AAWDYNTGGLKI

SEQ ID NO: 50532 - protein, 14 aa, synthetic construct
AAWDYIGSTGWFKI

SEQ ID NO: 50533 - protein, 12 aa, synthetic construct
AAWDYNRWWFKI

SEQ ID NO: 50534 - protein, 12 aa, synthetic construct
AAWDYNNGWFKI

SEQ ID NO: 50535 - protein, 9 aa, synthetic construct
AAWDYNKKL

SEQ ID NO: 50536 - protein, 12 aa, synthetic construct
AAWDYNIGWFKI

SEQ ID NO: 50537 - protein, 13 aa, synthetic construct
AAWDYKTSCLLKI

SEQ ID NO: 50538 - protein, 12 aa, synthetic construct
AAWDYKTGWFNI

SEQ ID NO: 50539 - protein, 12 aa, synthetic construct
AAWDYKTGWFKI

SEQ ID NO: 50540 - protein, 14 aa, synthetic construct
AAWDYIGDTGWFKI

SEQ ID NO: 50541 - protein, 13 aa, synthetic construct
AAWDYHTTGWFRI

SEQ ID NO: 50542 - protein, 14 aa, synthetic construct
AAWDYIGATGWSKI

SEQ ID NO: 50543 - protein, 14 aa, synthetic construct
AAWDYIGATGWFNI

SEQ ID NO: 50544 - protein, 14 aa, synthetic construct
AAWDYIGATGWFKK

SEQ ID NO: 50545 - protein, 14 aa, synthetic construct
AAWDYIGATGLFKI

SEQ ID NO: 50546 - protein, 14 aa, synthetic construct
AAWDYIGANGLFKI

SEQ ID NO: 50547 - protein, 13 aa, synthetic construct
AAWDYHTTVWFKI

SEQ ID NO: 50548 - protein, 13 aa, synthetic construct
AAWDYHTTGWVKI

SEQ ID NO: 50549 - protein, 12 aa, synthetic construct
AAWDYTTGWFKM

SEQ ID NO: 50550 - protein, 12 aa, synthetic construct
AAWDYTTGWFMI

SEQ ID NO: 50551 - protein, 12 aa, synthetic construct
AAWDYTTGWFQI

SEQ ID NO: 50552 - protein, 14 aa, synthetic construct
AAWEYEETTGWFKI

SEQ ID NO: 50553 - protein, 11 aa, synthetic construct
AAWEYTGWIKI

SEQ ID NO: 50554 - protein, 13 aa, synthetic construct
AAWEYRTTGWFKI

SEQ ID NO: 50555 - protein, 14 aa, synthetic construct
AAWEYRGATGWFKK

SEQ ID NO: 50556 - protein, 12 aa, synthetic construct
AAWEYNRGWFKI

SEQ ID NO: 50557 - protein, 14 aa, synthetic construct
AAWEYIGATGWFKI

SEQ ID NO: 50558 - protein, 13 aa, synthetic construct
AAWEYHTTGVFKI

SEQ ID NO: 50559 - protein, 14 aa, synthetic construct
AAWEYEETTGWFKL

SEQ ID NO: 50560 - protein, 9 aa, synthetic construct
AAWEYDKKL

SEQ ID NO: 50561 - protein, 12 aa, synthetic construct
AAWEYTTCWFKI

SEQ ID NO: 50562 - protein, 11 aa, synthetic construct
AAWESTGWFKV

SEQ ID NO: 50563 - protein, 13 aa, synthetic construct
AAWESQTTGWFKI

SEQ ID NO: 50564 - protein, 11 aa, synthetic construct
AAWESPGWFEI

SEQ ID NO: 50565 - protein, 13 aa, synthetic construct
AAWESNTNGRLKI

SEQ ID NO: 50566 - protein, 11 aa, synthetic construct
AAWESNGWFKI

SEQ ID NO: 50567 - protein, 13 aa, synthetic construct
AAWESHTTRWFKI

SEQ ID NO: 50568 - protein, 13 aa, synthetic construct
AAWESHTTGWFRI

SEQ ID NO: 50569 - protein, 12 aa, synthetic construct
AAWEYTPGWFQI

SEQ ID NO: 50570 - protein, 12 aa, synthetic construct
AAWEYTTGLFKI

SEQ ID NO: 50571 - protein, 12 aa, synthetic construct
AAWDYTTGWHKI

SEQ ID NO: 50572 - protein, 12 aa, synthetic construct
AAWGDTTGWFQI

SEQ ID NO: 50573 - protein, 14 aa, synthetic construct
AAWGFPYTTGWFKI

SEQ ID NO: 50574 - protein, 12 aa, synthetic construct
AAWGFATGWFEI

SEQ ID NO: 50575 - protein, 12 aa, synthetic construct
AAWGFAPGWFKI

SEQ ID NO: 50576 - protein, 12 aa, synthetic construct
AAWGETTGWLKI

SEQ ID NO: 50577 - protein, 12 aa, synthetic construct
AAWGEPTGWFQI

SEQ ID NO: 50578 - protein, 12 aa, synthetic construct
AAWGDTTVWFSF

SEQ ID NO: 50579 - protein, 12 aa, synthetic construct
AAWGDTTGWLKI

SEQ ID NO: 50580 - protein, 12 aa, synthetic construct
AAWGDTTGGFKI

SEQ ID NO: 50581 - protein, 12 aa, synthetic construct
AAWEYTTGWFMI

SEQ ID NO: 50582 - protein, 12 aa, synthetic construct
AAWGDTTGCFNI

SEQ ID NO: 50583 - protein, 12 aa, synthetic construct
AAWGDTTCCFKI

SEQ ID NO: 50584 - protein, 9 aa, synthetic construct
AAWGDDKKL

SEQ ID NO: 50585 - protein, 10 aa, synthetic construct
AAWFTGWFKI

SEQ ID NO: 50586 - protein, 9 aa, synthetic construct
AAWEYYTKL

SEQ ID NO: 50587 - protein, 9 aa, synthetic construct
AAWEYYKKI

SEQ ID NO: 50588 - protein, 12 aa, synthetic construct
AAWEYTTGWLKI

SEQ ID NO: 50589 - protein, 13 aa, synthetic construct
AAWESHTTGWFKT

SEQ ID NO: 50590 - protein, 13 aa, synthetic construct
AAWESHTTGLVKI

SEQ ID NO: 50591 - protein, 13 aa, synthetic construct
AAWESHTKRMLKI

SEQ ID NO: 50592 - protein, 9 aa, synthetic construct
AAWDYYKKP

SEQ ID NO: 50593 - protein, 11 aa, synthetic construct
AAWEATGWFKT

SEQ ID NO: 50594 - protein, 13 aa, synthetic construct
AAWEAHTTGWFKI

SEQ ID NO: 50595 - protein, 13 aa, synthetic construct
AAWDYYTNGWFKI

SEQ ID NO: 50596 - protein, 9 aa, synthetic construct
AAWDYYTKL

SEQ ID NO: 50597 - protein, 9 aa, synthetic construct
AAWDYYKRL

SEQ ID NO: 50598 - protein, 9 aa, synthetic construct
AAWDYYKQL

SEQ ID NO: 50599 - protein, 9 aa, synthetic construct
AAWDYYKKR

SEQ ID NO: 50600 - protein, 9 aa, synthetic construct
AAWDYYKIL

SEQ ID NO: 50601 - protein, 13 aa, synthetic construct
AAWESHNTGWFNK

SEQ ID NO: 50602 - protein, 14 aa, synthetic construct
AAWDYVETTGWFKI

SEQ ID NO: 50603 - protein, 14 aa, synthetic construct
AAWDYVDTTGWLKI

SEQ ID NO: 50604 - protein, 12 aa, synthetic construct
AAWDYTTSWLKI

SEQ ID NO: 50605 - protein, 12 aa, synthetic construct
AAWDYTTGWYKI

SEQ ID NO: 50606 - protein, 12 aa, synthetic construct
AAWDYTTGWLNI

SEQ ID NO: 50607 - protein, 12 aa, synthetic construct
AAWDYTTGWLKL

SEQ ID NO: 50608 - protein, 12 aa, synthetic construct
AAWDYTTGWLKK

SEQ ID NO: 50609 - protein, 12 aa, synthetic construct
AAWECKTGWVKI

SEQ ID NO: 50610 - protein, 11 aa, synthetic construct
AAWECTGWFKI

SEQ ID NO: 50611 - protein, 12 aa, synthetic construct
AAWECTTGWLKI

SEQ ID NO: 50612 - protein, 12 aa, synthetic construct
AAWEDTTGWFKI

SEQ ID NO: 50613 - protein, 13 aa, synthetic construct
AAWEQHTTGWSKI

SEQ ID NO: 50614 - protein, 13 aa, synthetic construct
AAWEQHTNGWFKI

SEQ ID NO: 50615 - protein, 14 aa, synthetic construct
AAWELTNTTGWFKI

SEQ ID NO: 50616 - protein, 12 aa, synthetic construct
AAWELGPGWFKI

SEQ ID NO: 50617 - protein, 14 aa, synthetic construct
AAWEFTQSRGWLKI

SEQ ID NO: 50618 - protein, 14 aa, synthetic construct
AAWEFTHTTGWLKI

SEQ ID NO: 50619 - protein, 12 aa, synthetic construct
AAWEFATGWVML

SEQ ID NO: 50620 - protein, 12 aa, synthetic construct
AAWEFATGWVKI

SEQ ID NO: 50621 - protein, 12 aa, synthetic construct
AAWEFATGWLKI

SEQ ID NO: 50622 - protein, 12 aa, synthetic construct
AAWEFATGWFRI

SEQ ID NO: 50623 - protein, 12 aa, synthetic construct
AAWEFATGWFNI

SEQ ID NO: 50624 - protein, 12 aa, synthetic construct
AAWEFATGWFGI

SEQ ID NO: 50625 - protein, 12 aa, synthetic construct
AAWEFATGGFKI

SEQ ID NO: 50626 - protein, 12 aa, synthetic construct
AAWEFATCWFNI

SEQ ID NO: 50627 - protein, 9 aa, synthetic construct
AAWEEHTTG

SEQ ID NO: 50628 - protein, 14 aa, synthetic construct
AAWDYEETIGWFKI

SEQ ID NO: 50629 - protein, 14 aa, synthetic construct
AAWDYEEPTGWFKI

SEQ ID NO: 50630 - protein, 14 aa, synthetic construct
AAWDYEATTGRFKI

SEQ ID NO: 50631 - protein, 13 aa, synthetic construct
AAWDQHTTGWFKM

SEQ ID NO: 50632 - protein, 13 aa, synthetic construct
AAWDQHTTGWLKK

SEQ ID NO: 50633 - protein, 13 aa, synthetic construct
AAWDQHTTGWLEI

SEQ ID NO: 50634 - protein, 13 aa, synthetic construct
AAWDQHTTGWIKI

SEQ ID NO: 50635 - protein, 13 aa, synthetic construct
AAWDQHTTGWGKV

SEQ ID NO: 50636 - protein, 13 aa, synthetic construct
AAWDQHTTGWFNK

SEQ ID NO: 50637 - protein, 13 aa, synthetic construct
AAWDQHTTGWFMI

SEQ ID NO: 50638 - protein, 13 aa, synthetic construct
AAWDQHTTGWFKR

SEQ ID NO: 50639 - protein, 13 aa, synthetic construct
AAWDQHTTGLFRI

SEQ ID NO: 50640 - protein, 13 aa, synthetic construct
AAWDQHTTGWLNI

SEQ ID NO: 50641 - protein, 13 aa, synthetic construct
AAWDQHTTGLFNI

SEQ ID NO: 50642 - protein, 13 aa, synthetic construct
AAWDQHTTGLFKV

SEQ ID NO: 50643 - protein, 13 aa, synthetic construct
AAWDQHTTGGFKI

SEQ ID NO: 50644 - protein, 13 aa, synthetic construct
AAWDQHTTGCFKI

SEQ ID NO: 50645 - protein, 9 aa, synthetic construct
AAWDQHTTG

SEQ ID NO: 50646 - protein, 8 aa, synthetic construct
AAWDQHTT

SEQ ID NO: 50647 - protein, 13 aa, synthetic construct
AAWDQHTKGWLKI

SEQ ID NO: 50648 - protein, 13 aa, synthetic construct
AAWDQHTTGWLMI

SEQ ID NO: 50649 - protein, 13 aa, synthetic construct
AAWDQHTTRLFKI

SEQ ID NO: 50650 - protein, 12 aa, synthetic construct
AAWDSGTGWFKI

SEQ ID NO: 50651 - protein, 13 aa, synthetic construct
AAWDQQTTGWLKI

SEQ ID NO: 50652 - protein, 13 aa, synthetic construct
AAWDSEATGWFKI

SEQ ID NO: 50653 - protein, 13 aa, synthetic construct
AAWDSDTTGWFKI

SEQ ID NO: 50654 - protein, 11 aa, synthetic construct
AAWDSAGWFKK

SEQ ID NO: 50655 - protein, 11 aa, synthetic construct
AAWDSAGLFKI

SEQ ID NO: 50656 - protein, 11 aa, synthetic construct
AAWDRTGWFKI

SEQ ID NO: 50657 - protein, 13 aa, synthetic construct
AAWDRDTTGLFKK

SEQ ID NO: 50658 - protein, 13 aa, synthetic construct
AAWDRDTTGLFKI

SEQ ID NO: 50659 - protein, 13 aa, synthetic construct
AAWDQQTPGWFKI

SEQ ID NO: 50660 - protein, 13 aa, synthetic construct
AAWDQKTTGWFKI

SEQ ID NO: 50661 - protein, 13 aa, synthetic construct
AAWDQQNTGLFKI

SEQ ID NO: 50662 - protein, 13 aa, synthetic construct
AAWDQPTTGWLKI

SEQ ID NO: 50663 - protein, 13 aa, synthetic construct
AAWDQPTTGWFKI

SEQ ID NO: 50664 - protein, 13 aa, synthetic construct
AAWDQPNTGWFKI

SEQ ID NO: 50665 - protein, 13 aa, synthetic construct
AAWDQNTTGWLKI

SEQ ID NO: 50666 - protein, 13 aa, synthetic construct
AAWDQNNTGWFKI

SEQ ID NO: 50667 - protein, 13 aa, synthetic construct
AAWDQLTTGWFKI

SEQ ID NO: 50668 - protein, 13 aa, synthetic construct
AAWDQHSTGWFKI

SEQ ID NO: 50669 - protein, 13 aa, synthetic construct
AAWDQHNTGWFKV

SEQ ID NO: 50670 - protein, 11 aa, synthetic construct
AAWDPTCWFKI

SEQ ID NO: 50671 - protein, 12 aa, synthetic construct
AAWDHTAGWFKI

SEQ ID NO: 50672 - protein, 14 aa, synthetic construct
AAWDLNHTTGWFKI

SEQ ID NO: 50673 - protein, 13 aa, synthetic construct
AAWDLGTTCWFKI

SEQ ID NO: 50674 - protein, 12 aa, synthetic construct
AAWDLGTGWFKI

SEQ ID NO: 50675 - protein, 12 aa, synthetic construct
AAWDLDTGWFKI

SEQ ID NO: 50676 - protein, 14 aa, synthetic construct
AAWDLAHTTGWFKI

SEQ ID NO: 50677 - protein, 13 aa, synthetic construct
AAWDKQTTGWFKI

SEQ ID NO: 50678 - protein, 14 aa, synthetic construct
AAWDINQTTVWFKK

SEQ ID NO: 50679 - protein, 13 aa, synthetic construct
AAWDHQTTGWFKK

SEQ ID NO: 50680 - protein, 13 aa, synthetic construct
AAWDPQTTGWFKI

SEQ ID NO: 50681 - protein, 9 aa, synthetic construct
AAWDFWFKI

SEQ ID NO: 50682 - protein, 14 aa, synthetic construct
AAWDFTYTTGWFKI

SEQ ID NO: 50683 - protein, 14 aa, synthetic construct
AAWDFTQTKGWFNI

SEQ ID NO: 50684 - protein, 14 aa, synthetic construct
AAWDFTNTTGRFKI

SEQ ID NO: 50685 - protein, 14 aa, synthetic construct
AAWDFTLTTGWFKI

SEQ ID NO: 50686 - protein, 14 aa, synthetic construct
AAWDFTHTTVWFKI

SEQ ID NO: 50687 - protein, 14 aa, synthetic construct
AAWDFTHTTGWYKI

SEQ ID NO: 50688 - protein, 14 aa, synthetic construct
AAWDLPHTTGWFKI

SEQ ID NO: 50689 - protein, 14 aa, synthetic construct
AAWDLTHNNGWFNI

SEQ ID NO: 50690 - protein, 14 aa, synthetic construct
AAWDLTHTPGWFKI

SEQ ID NO: 50691 - protein, 14 aa, synthetic construct
AAWDLTHTRGWFKI

SEQ ID NO: 50692 - protein, 11 aa, synthetic construct
AAWDPPGWFKI

SEQ ID NO: 50693 - protein, 12 aa, synthetic construct
AAWDPLNYYKKL

SEQ ID NO: 50694 - protein, 13 aa, synthetic construct
AAWDPHTTGWVKI

SEQ ID NO: 50695 - protein, 13 aa, synthetic construct
AAWDPHSTCLFKI

SEQ ID NO: 50696 - protein, 12 aa, synthetic construct
AAWDPGTGWFKI

SEQ ID NO: 50697 - protein, 12 aa, synthetic construct
AAWDNTTGLVNI

SEQ ID NO: 50698 - protein, 11 aa, synthetic construct
AAWDNTGWFKI

SEQ ID NO: 50699 - protein, 13 aa, synthetic construct
AAWDNHNTGWFRI

SEQ ID NO: 50700 - protein, 14 aa, synthetic construct
AAWDLTQNTGWIKI

SEQ ID NO: 50701 - protein, 14 aa, synthetic construct
AAWDLTQKTGLFNI

SEQ ID NO: 50702 - protein, 14 aa, synthetic construct
AAWDLTNTTGWLKI

SEQ ID NO: 50703 - protein, 14 aa, synthetic construct
AAWDLTHTTGWLKI

SEQ ID NO: 50704 - protein, 14 aa, synthetic construct
AAWDLTHTTGWFKV

SEQ ID NO: 50705 - protein, 14 aa, synthetic construct
AAWDLTHTTGLFKI

SEQ ID NO: 50706 - protein, 14 aa, synthetic construct
AAWDLTHTSGWFKI

SEQ ID NO: 50707 - protein, 14 aa, synthetic construct
AAWDSGGNTGWFKI

SEQ ID NO: 50708 - protein, 10 aa, synthetic construct
AAWDSGWFKI

SEQ ID NO: 50709 - protein, 13 aa, synthetic construct
AAWDYDTTGWFKI

SEQ ID NO: 50710 - protein, 11 aa, synthetic construct
AAWDSTGWFTI

SEQ ID NO: 50711 - protein, 11 aa, synthetic construct
AAWDSTVWFKI

SEQ ID NO: 50712 - protein, 12 aa, synthetic construct
AAWDSTTGWFKI

SEQ ID NO: 50713 - protein, 11 aa, synthetic construct
AAWDSTSWFKI

SEQ ID NO: 50714 - protein, 11 aa, synthetic construct
AAWDSTGWVKI

SEQ ID NO: 50715 - protein, 11 aa, synthetic construct
AAWDSTGWVKG

SEQ ID NO: 50716 - protein, 11 aa, synthetic construct
AAWDSTGWLKM

SEQ ID NO: 50717 - protein, 11 aa, synthetic construct
AAWDSTGWFTL

SEQ ID NO: 50718 - protein, 11 aa, synthetic construct
AAWDSTGWFQI

SEQ ID NO: 50719 - protein, 13 aa, synthetic construct
AAWDSYTTGWFRI

SEQ ID NO: 50720 - protein, 11 aa, synthetic construct
AAWDSTGWFLL

SEQ ID NO: 50721 - protein, 11 aa, synthetic construct
AAWDSTCWFQI

SEQ ID NO: 50722 - protein, 14 aa, synthetic construct
AAWDSRGATGWFKI

SEQ ID NO: 50723 - protein, 9 aa, synthetic construct
AAWDSRATG

SEQ ID NO: 50724 - protein, 13 aa, synthetic construct
AAWDSQTTGWLNI

SEQ ID NO: 50725 - protein, 13 aa, synthetic construct
AAWDSQTTGLFKI

SEQ ID NO: 50726 - protein, 13 aa, synthetic construct
AAWDSQTTGCVKI

SEQ ID NO: 50727 - protein, 10 aa, synthetic construct
AAWDSWWFKI

SEQ ID NO: 50728 - protein, 10 aa, synthetic construct
AAWDTGWFKI

SEQ ID NO: 50729 - protein, 13 aa, synthetic construct
AAWDSHKTGLFKI

SEQ ID NO: 50730 - protein, 11 aa, synthetic construct
AAWDTTGWSKI

SEQ ID NO: 50731 - protein, 12 aa, synthetic construct
AAWDYDTGWFKI

SEQ ID NO: 50732 - protein, 9 aa, synthetic construct
AAWDYDKKL

SEQ ID NO: 50733 - protein, 14 aa, synthetic construct
AAWDYDETTGCFKI

SEQ ID NO: 50734 - protein, 13 aa, synthetic construct
AAWDWNTTGWFKI

SEQ ID NO: 50735 - protein, 14 aa, synthetic construct
AAWDVTHTTGWFKI

SEQ ID NO: 50736 - protein, 12 aa, synthetic construct
AAWDVDKGWFKI

SEQ ID NO: 50737 - protein, 11 aa, synthetic construct
AAWDTTGWVKI

SEQ ID NO: 50738 - protein, 11 aa, synthetic construct
AAWDTTGWFNI

SEQ ID NO: 50739 - protein, 13 aa, synthetic construct
AAWDTLTTGWCKI

SEQ ID NO: 50740 - protein, 11 aa, synthetic construct
AAWDTTGWFKL

SEQ ID NO: 50741 - protein, 11 aa, synthetic construct
AAWDTTGWCKI

SEQ ID NO: 50742 - protein, 11 aa, synthetic construct
AAWDTTGRFKI

SEQ ID NO: 50743 - protein, 7 aa, synthetic construct
AAWDTTG

SEQ ID NO: 50744 - protein, 11 aa, synthetic construct
AAWDTTCWFKI

SEQ ID NO: 50745 - protein, 13 aa, synthetic construct
AAWDTQTTGWFKI

SEQ ID NO: 50746 - protein, 11 aa, synthetic construct
AAWDTNSWFKI

SEQ ID NO: 50747 - protein, 13 aa, synthetic construct
AAWDSQTTCWFKI

SEQ ID NO: 50748 - protein, 13 aa, synthetic construct
AAWDSQTNGWLKI

SEQ ID NO: 50749 - protein, 13 aa, synthetic construct
AAWDSQNTGWVNI

SEQ ID NO: 50750 - protein, 13 aa, synthetic construct
AAWDSHTSGWLKI

SEQ ID NO: 50751 - protein, 13 aa, synthetic construct
AAWDSHTTGRVKI

SEQ ID NO: 50752 - protein, 13 aa, synthetic construct
AAWDSHTTGRFMI

SEQ ID NO: 50753 - protein, 12 aa, synthetic construct
AAWDSHTTGCSR

SEQ ID NO: 50754 - protein, 13 aa, synthetic construct
AAWDSHTTDWFKI

SEQ ID NO: 50755 - protein, 13 aa, synthetic construct
AAWDSHTTCWVKI

SEQ ID NO: 50756 - protein, 13 aa, synthetic construct
AAWDSHTTCWFKV

SEQ ID NO: 50757 - protein, 13 aa, synthetic construct
AAWDSHTTAWFKI

SEQ ID NO: 50758 - protein, 13 aa, synthetic construct
AAWDSHTQGWFKI

SEQ ID NO: 50759 - protein, 13 aa, synthetic construct
AAWDSQNTGWVKI

SEQ ID NO: 50760 - protein, 13 aa, synthetic construct
AAWDSHTPGWVKI

SEQ ID NO: 50761 - protein, 13 aa, synthetic construct
AAWDSHTNGWLKI

SEQ ID NO: 50762 - protein, 13 aa, synthetic construct
AAWDSHTKGWFKK

SEQ ID NO: 50763 - protein, 13 aa, synthetic construct
AAWDSHTAGWVKI

SEQ ID NO: 50764 - protein, 13 aa, synthetic construct
AAWDSHTAGWFNI

SEQ ID NO: 50765 - protein, 13 aa, synthetic construct
AAWDSHTAGLFKI

SEQ ID NO: 50766 - protein, 13 aa, synthetic construct
AAWDSHNTGWLKI

SEQ ID NO: 50767 - protein, 13 aa, synthetic construct
AAWDSHTTGWFKR

SEQ ID NO: 50768 - protein, 13 aa, synthetic construct
AAWDSHTTGWGKI

SEQ ID NO: 50769 - protein, 13 aa, synthetic construct
AAWDSHTTGWLKK

SEQ ID NO: 50770 - protein, 13 aa, synthetic construct
AAWDSHTTGWLNI

SEQ ID NO: 50771 - protein, 13 aa, synthetic construct
AAWDSQNTCWLKI

SEQ ID NO: 50772 - protein, 13 aa, synthetic construct
AAWDSPTTGWLKI

SEQ ID NO: 50773 - protein, 13 aa, synthetic construct
AAWDSPATGWFKI

SEQ ID NO: 50774 - protein, 11 aa, synthetic construct
AAWDSNGWFKI

SEQ ID NO: 50775 - protein, 11 aa, synthetic construct
AAWDSNGLLKI

SEQ ID NO: 50776 - protein, 11 aa, synthetic construct
AAWDSNGLCQI

SEQ ID NO: 50777 - protein, 13 aa, synthetic construct
AAWDSLTTGWFKI

SEQ ID NO: 50778 - protein, 13 aa, synthetic construct
AAWDSKTTGWLKK

SEQ ID NO: 50779 - protein, 13 aa, synthetic construct
AAWDSKNTGLFKI

SEQ ID NO: 50780 - protein, 13 aa, synthetic construct
AAWDSITTGWFKI

SEQ ID NO: 50781 - protein, 12 aa, synthetic construct
AAWDSHTTVGSR

SEQ ID NO: 50782 - protein, 13 aa, synthetic construct
AAWDSHTTSLFKI

SEQ ID NO: 50783 - protein, 13 aa, synthetic construct
AAWDSHTTRWFKI

SEQ ID NO: 50784 - protein, 13 aa, synthetic construct
AAWDSHTTRLFKI

SEQ ID NO: 50785 - protein, 13 aa, synthetic construct
AAWDSHTTGWVKV

SEQ ID NO: 50786 - protein, 12 aa, synthetic construct
YAWDYTTGWFKI

SEQ ID NO: 50787 - DNA, 462 bp, synthetic construct
  source 1..462: mol_type = other DNA
gnnnnnnnnnnnnttnnncatacacccttataacatctggaaagaacttttcaaggagacaaaggtatgtcccagtcttatggagatttgtttcagcaacagaaggaaggaaaatagtgggcttgggggaaatgtctgcatcaagccttttgtcagagggaattactatgagcttagttccttctgcaaataccttgtgaaaacctgagctatgcccgtcccaggtggtgcagtaatagaccccacagtcattttcaattanatttcgcagtatcaatctcaagttgttccttgtgcttgcgtaagtataatacttccctggactgactcctgattccaacacaaccttggagttgtaggagtcatagtactgaagacgctgtggggccttcccctcctggtgtaggtaccagtggatgtagccgttacttccttcatgaagatcanaagtgattacagaga

SEQ ID NO: 50788 - DNA, 465 bp, synthetic construct
  source 1..465: mol_type = other DNA
ggnnnnnnnnnncnttttntncatacacccttataacatctggaaagaacttttcaaggagacaaaggtatgtcccagtcttatggagatttgtttcagcaacagaaggaaggaaaatagtgggcttgggggaaatgtctgcatcaagccttttgtcagagggaattactatgagcttagttccttctgcaaataccttgtgaaaacctgagctatatccccaggtggcacagtaatagaccccagaatcattttcaattagatttcgtagtatcaatatccagctccacctcctgggtgtatgagtataatactttcctggactgagtcctgattccaacacatcctttgagttggagacgtcatagtacaaaaaacgctgtggggccttcccctcctggtgtaggtaccagtggatgtagaaggcatttgttacagtaaggtcacnnnngatttcaanttcaa

SEQ ID NO: 50789 - protein, 4 aa, synthetic construct
PSVF

SEQ ID NO: 50790 - protein, 4 aa, synthetic construct
MKNG

SEQ ID NO: 50791 - protein, 7 aa, synthetic construct
GTNVACL

SEQ ID NO: 50792 - protein, 7 aa, synthetic construct
SAVKLGQ

SEQ ID NO: 50793 - protein, 6 aa, synthetic construct
SVTCSV

SEQ ID NO: 50794 - protein, 7 aa, synthetic construct
KVNMMSL

SEQ ID NO: 50795 - protein, 5 aa, synthetic construct
VLGLR

SEQ ID NO: 50796 - protein, 4 aa, synthetic construct
LFAK

SEQ ID NO: 50797 - protein, 4 aa, synthetic construct
NFLL

SEQ ID NO: 50798 - protein, 4 aa, synthetic construct
PKPT

SEQ ID NO: 50799 - protein, 4 aa, synthetic construct
LCLL

SEQ ID NO: 50800 - protein, 4 aa, synthetic construct
KTKD

SEQ ID NO: 50801 - protein, 7 aa, synthetic construct
MKFSWLT

SEQ ID NO: 50802 - protein, 5 aa, synthetic construct
TSAYY

SEQ ID NO: 50803 - protein, 7 aa, synthetic construct
LLLLLKS

SEQ ID NO: 50804 - protein, 7 aa, synthetic construct
TSWWSYY

SEQ ID NO: 50805 - protein, 8 aa, synthetic construct
GEAIGNYY

SEQ ID NO: 50806 - protein, 7 aa, synthetic construct
TVYSNPD

SEQ ID NO: 50807 - protein, 7 aa, synthetic construct
TSDPSYG

SEQ ID NO: 50808 - protein, 8 aa, synthetic construct
QGSYDQQN

SEQ ID NO: 50809 - protein, 4 aa, synthetic construct
AMRE

SEQ ID NO: 50810 - protein, 4 aa, synthetic construct
TRQM

SEQ ID NO: 50811 - protein, 6 aa, synthetic construct
NTAFDY

SEQ ID NO: 50812 - protein, 7 aa, synthetic construct
IRPDVSE

SEQ ID NO: 50813 - protein, 8 aa, synthetic construct
GITISATS

SEQ ID NO: 50814 - protein, 7 aa, synthetic construct
ISYDGTV

SEQ ID NO: 50815 - protein, 4 aa, synthetic construct
ALWE

SEQ ID NO: 50816 - protein, 4 aa, synthetic construct
ASWE

SEQ ID NO: 50817 - protein, 4 aa, synthetic construct
ALCE

SEQ ID NO: 50818 - protein, 4 aa, synthetic construct
ALLE

SEQ ID NO: 50819 - protein, 4 aa, synthetic construct
ALRE

SEQ ID NO: 50820 - protein, 4 aa, synthetic construct
PCGR

SEQ ID NO: 50821 - protein, 4 aa, synthetic construct
AWWE

SEQ ID NO: 50822 - protein, 4 aa, synthetic construct
DLWE

SEQ ID NO: 50823 - protein, 4 aa, synthetic construct
AMWE

SEQ ID NO: 50824 - protein, 8 aa, synthetic construct
STRFETDV

SEQ ID NO: 50825 - protein, 8 aa, synthetic construct
IVSTKSAA

SEQ ID NO: 50826 - protein, 4 aa, synthetic construct
AAWF

SEQ ID NO: 50827 - protein, 4 aa, synthetic construct
AASP

SEQ ID NO: 50828 - protein, 7 aa, synthetic construct
ISYDGTV

SEQ ID NO: 50829 - protein, 4 aa, synthetic construct
TLWE

SEQ ID NO: 50830 - protein, 4 aa, synthetic construct
KNQG

SEQ ID NO: 50831 - protein, 13 aa, synthetic construct
ACDILGDTDKLIF

SEQ ID NO: 50832 - protein, 16 aa, synthetic construct
ACDTVLGDTWDTRQMF

SEQ ID NO: 50833 - protein, 17 aa, synthetic construct
ACDTVLGDSSWDTRQMF

SEQ ID NO: 50834 - protein, 12 aa, synthetic construct
ACDILGDTAQLF

SEQ ID NO: 50835 - protein, 12 aa, synthetic construct
ACDTWGYTDKLI

SEQ ID NO: 50836 - protein, 11 aa, synthetic construct
ACDTWGTDKLI

SEQ ID NO: 50837 - protein, 14 aa, synthetic construct
ACDILGDTLTAQLF

SEQ ID NO: 50838 - protein, 16 aa, synthetic construct
ACDSTGGYSWDTRQMF

SEQ ID NO: 50839 - protein, 16 aa, synthetic construct
ACDTAGGYSWDTRQMF

SEQ ID NO: 50840 - DNA, 25 bp, synthetic construct
  source 1..25: mol_type = other DNA
tacctatgggaggaaacagaatctc

SEQ ID NO: 50841 - DNA, 23 bp, synthetic construct
  source 1..23: mol_type = other DNA
tgcaggtcacctagagcaacctc

SEQ ID NO: 50842 - DNA, 24 bp, synthetic construct
  source 1..24: mol_type = other DNA
aaagtggagcagttccagctatcc

SEQ ID NO: 50843 - DNA, 25 bp, synthetic construct
  source 1..25: mol_type = other DNA
tatcttggaaggcatccatccaagg

SEQ ID NO: 50844 - DNA, 24 bp, synthetic construct
  source 1..24: mol_type = other DNA
aatcttcagtcaccgtcagccaac

SEQ ID NO: 50845 - DNA, 23 bp, synthetic construct
  source 1..23: mol_type = other DNA
cgcctggaatgtgtggtgtctgg

SEQ ID NO: 50846 - DNA, 24 bp, synthetic construct
  source 1..24: mol_type = other DNA
cataccttgcaagatatcgagcac

SEQ ID NO: 50847 - DNA, 24 bp, synthetic construct
  source 1..24: mol_type = other DNA
catacactggtactggcagaaacc

SEQ ID NO: 50848 - protein, 13 aa, synthetic construct
ALGVTGGYPDKLI

SEQ ID NO: 50849 - protein, 10 aa, synthetic construct
ALGAIPDKLI

SEQ ID NO: 50850 - protein, 13 aa, synthetic construct
ALGVYWGPLDKLI

SEQ ID NO: 50851 - protein, 13 aa, synthetic construct
ALGEGWGISDKLI

SEQ ID NO: 50852 - protein, 13 aa, synthetic construct
ALGSRPGGYDKLI

SEQ ID NO: 50853 - protein, 13 aa, synthetic construct
ALGELGVHTDKLI

SEQ ID NO: 50854 - protein, 14 aa, synthetic construct
ALGEGWGAYTDKLI

SEQ ID NO: 50855 - protein, 11 aa, synthetic construct
ALGPSYTDKLI

SEQ ID NO: 50856 - protein, 12 aa, synthetic construct
ALGELPSSDKLI

SEQ ID NO: 50857 - protein, 13 aa, synthetic construct
AMREGPHVGMGLI

SEQ ID NO: 50858 - protein, 10 aa, synthetic construct
AMREGDTGLI

SEQ ID NO: 50859 - protein, 10 aa, synthetic construct
AMREGWGKLI

SEQ ID NO: 50860 - protein, 13 aa, synthetic construct
AMREGWGYTDKLI

SEQ ID NO: 50861 - protein, 13 aa, synthetic construct
AMRAYWARADKLI

SEQ ID NO: 50862 - protein, 13 aa, synthetic construct
AMRARTGGCDKLI

SEQ ID NO: 50863 - protein, 15 aa, synthetic construct
AMRESTGGYATDKLI

SEQ ID NO: 50864 - protein, 13 aa, synthetic construct
AMRELGDTFDKLI

SEQ ID NO: 50865 - protein, 12 aa, synthetic construct
AMREGWGILKLI

SEQ ID NO: 50866 - protein, 13 aa, synthetic construct
AMREGDTHTDKLI

SEQ ID NO: 50867 - protein, 14 aa, synthetic construct
ALGFYWGTPYTDKL

SEQ ID NO: 50868 - protein, 14 aa, synthetic construct
ALGFYWGTPYTEKL

SEQ ID NO: 50869 - protein, 14 aa, synthetic construct
ALGFYWGTPYTDQL

SEQ ID NO: 50870 - protein, 13 aa, synthetic construct
ALGFYWGTPYTDK

SEQ ID NO: 50871 - protein, 14 aa, synthetic construct
ALGFYWGTPNTDKL

SEQ ID NO: 50872 - protein, 14 aa, synthetic construct
DLGFYWGTPYTDKL

SEQ ID NO: 50873 - protein, 14 aa, synthetic construct
ALGFYWGTPSTDKL

SEQ ID NO: 50874 - protein, 14 aa, synthetic construct
ALGFYWGTPYTDNL

SEQ ID NO: 50875 - protein, 14 aa, synthetic construct
ALGCYWGTPYTDKL

SEQ ID NO: 50876 - protein, 14 aa, synthetic construct
LLGFTGGPRTPINS

SEQ ID NO: 50877 - protein, 12 aa, synthetic construct
AMREGGVYDKLI

SEQ ID NO: 50878 - protein, 10 aa, synthetic construct
AMRPSYYKLI

SEQ ID NO: 50879 - protein, 16 aa, synthetic construct
AMREGLPGGYARDKLI

SEQ ID NO: 50880 - protein, 11 aa, synthetic construct
AMREGFSNKLI

SEQ ID NO: 50881 - protein, 12 aa, synthetic construct
AMREGGVYNKLI

SEQ ID NO: 50882 - protein, 12 aa, synthetic construct
AMREGGVYYKLI

SEQ ID NO: 50883 - protein, 10 aa, synthetic construct
AMRPSYYELI

SEQ ID NO: 50884 - protein, 12 aa, synthetic construct
ATREGGVYDKLI

SEQ ID NO: 50885 - protein, 12 aa, synthetic construct
AMRGGGVYDKLI

SEQ ID NO: 50886 - protein, 12 aa, synthetic construct
AMREGGVYGKLI

SEQ ID NO: 50887 - protein, 11 aa, synthetic construct
ALGEDTADKLI

SEQ ID NO: 50888 - protein, 13 aa, synthetic construct
ALGVPGGYPDKLI

SEQ ID NO: 50889 - protein, 13 aa, synthetic construct
ALGELEGDTDKLI

SEQ ID NO: 50890 - protein, 14 aa, synthetic construct
ALGEPGDRSSWDTR

SEQ ID NO: 50891 - protein, 12 aa, synthetic construct
ALGEPWGPDKLI

SEQ ID NO: 50892 - protein, 14 aa, synthetic construct
ALGDPLWGISYTDK

SEQ ID NO: 50893 - protein, 12 aa, synthetic construct
ALGAWGGILKLI

SEQ ID NO: 50894 - protein, 14 aa, synthetic construct
ALGEYWGIQDDKLI

SEQ ID NO: 50895 - protein, 14 aa, synthetic construct
ALGELDWGINTDKL

SEQ ID NO: 50896 - protein, 14 aa, synthetic construct
ACDTGGGYDTDKLI

SEQ ID NO: 50897 - protein, 14 aa, synthetic construct
ACDKYWGLYTDKLI

SEQ ID NO: 50898 - protein, 13 aa, synthetic construct
ACDNTGAYTDKLI

SEQ ID NO: 50899 - protein, 14 aa, synthetic construct
ACDTGGGYDTEKLI

SEQ ID NO: 50900 - protein, 14 aa, synthetic construct
ACDTGGGYDTDQLI

SEQ ID NO: 50901 - protein, 14 aa, synthetic construct
ACDTGGGDDTDKLI

SEQ ID NO: 50902 - protein, 13 aa, synthetic construct
ACDTGGDYTEKLI

SEQ ID NO: 50903 - protein, 14 aa, synthetic construct
ACDKYWGLYTEKLI

SEQ ID NO: 50904 - protein, 13 aa, synthetic construct
ACDRGGGDTDKLI

SEQ ID NO: 50905 - protein, 13 aa, synthetic construct
ALGELEGIRHKLI

SEQ ID NO: 50906 - protein, 14 aa, synthetic construct
ALGELLPGGYVDKL

SEQ ID NO: 50907 - protein, 13 aa, synthetic construct
ALGDLEGIRHKLI

SEQ ID NO: 50908 - protein, 14 aa, synthetic construct
ALGDLLPGGYVDKL

SEQ ID NO: 50909 - protein, 14 aa, synthetic construct
ALGELLHGGYVDKL

SEQ ID NO: 50910 - protein, 12 aa, synthetic construct
ACELLGDDDKLI

SEQ ID NO: 50911 - protein, 12 aa, synthetic construct
ACELLGDDEKLI

SEQ ID NO: 50912 - protein, 12 aa, synthetic construct
ACELRGDDDKLI

SEQ ID NO: 50913 - protein, 12 aa, synthetic construct
PVSYWGMTINSS

SEQ ID NO: 50914 - protein, 12 aa, synthetic construct
ACELLGDDDKLF

SEQ ID NO: 50915 - protein, 12 aa, synthetic construct
ACELLGDDDNLI

SEQ ID NO: 50916 - protein, 12 aa, synthetic construct
ARELLGDDDKLI

SEQ ID NO: 50917 - protein, 12 aa, synthetic construct
AGELLGDDDKLI

SEQ ID NO: 50918 - protein, 12 aa, synthetic construct
ACELLGDDDQLI

SEQ ID NO: 50919 - protein, 12 aa, synthetic construct
ACELLGDDYKLI

SEQ ID NO: 50920 - protein, 7 aa, synthetic construct
AMRDGLI

SEQ ID NO: 50921 - protein, 10 aa, synthetic construct
AMKGDTDKLI

SEQ ID NO: 50922 - protein, 14 aa, synthetic construct
AMSPRWGIRPDKLI

SEQ ID NO: 50923 - protein, 13 aa, synthetic construct
AMRVTGGNTDKLI

SEQ ID NO: 50924 - protein, 13 aa, synthetic construct
AMREGPPSPINSS

SEQ ID NO: 50925 - protein, 14 aa, synthetic construct
AMREGCGSHTDKLI

SEQ ID NO: 50926 - protein, 14 aa, synthetic construct
AMRLYWGEYTDKLI

SEQ ID NO: 50927 - protein, 14 aa, synthetic construct
AMREGLWGIRDKLI

SEQ ID NO: 50928 - protein, 14 aa, synthetic construct
AMREGLGDTSDKLI

SEQ ID NO: 50929 - protein, 12 aa, synthetic construct
AMREAGVTDKLI

SEQ ID NO: 50930 - protein, 9 aa, synthetic construct
AASTGGQVP

SEQ ID NO: 50931 - protein, 13 aa, synthetic construct
AANHWGPYTDKLI

SEQ ID NO: 50932 - protein, 13 aa, synthetic construct
AASSPGGGYDKLI

SEQ ID NO: 50933 - protein, 10 aa, synthetic construct
AASREGYGAI

SEQ ID NO: 50934 - protein, 12 aa, synthetic construct
AAVGYGNPDKLI

SEQ ID NO: 50935 - protein, 10 aa, synthetic construct
AASMGGDKLI

SEQ ID NO: 50936 - protein, 13 aa, synthetic construct
AASGGGYTTDKLI

SEQ ID NO: 50937 - protein, 13 aa, synthetic construct
AASRGDTGTDKLI

SEQ ID NO: 50938 - protein, 12 aa, synthetic construct
AASVVGDTDKLI

SEQ ID NO: 50939 - protein, 15 aa, synthetic construct
AASMAGWGIVTDKLI

SEQ ID NO: 50940 - protein, 13 aa, synthetic construct
AMRERGSYTDKLI

SEQ ID NO: 50941 - protein, 13 aa, synthetic construct
AMRERGSYTDELI

SEQ ID NO: 50942 - protein, 13 aa, synthetic construct
AMRERGSYTDKLY

SEQ ID NO: 50943 - protein, 13 aa, synthetic construct
AMREGGSYTDKLI

SEQ ID NO: 50944 - protein, 13 aa, synthetic construct
AMRERGSYADKLI

SEQ ID NO: 50945 - protein, 13 aa, synthetic construct
AMSHTGGWAINSS

SEQ ID NO: 50946 - protein, 13 aa, synthetic construct
ALRERGSYTDKLI

SEQ ID NO: 50947 - protein, 13 aa, synthetic construct
AVRERGSYTDKLI

SEQ ID NO: 50948 - protein, 13 aa, synthetic construct
AMRERGSYTDKLT

SEQ ID NO: 50949 - protein, 13 aa, synthetic construct
AMRERGPYTDKLI

SEQ ID NO: 50950 - protein, 9 aa, synthetic construct
AEGDTDKLI

SEQ ID NO: 50951 - protein, 12 aa, synthetic construct
AALGSSWDTRQM

SEQ ID NO: 50952 - protein, 11 aa, synthetic construct
QHWGAPGTPDR

SEQ ID NO: 50953 - protein, 9 aa, synthetic construct
AEGDTEKLI

SEQ ID NO: 50954 - protein, 9 aa, synthetic construct
AEGDTDQLI

SEQ ID NO: 50955 - protein, 9 aa, synthetic construct
QRGIPINSS

SEQ ID NO: 50956 - protein, 12 aa, synthetic construct
AALGSSWDTRRM

SEQ ID NO: 50957 - protein, 11 aa, synthetic construct
STGELLGHPTD

SEQ ID NO: 50958 - protein, 9 aa, synthetic construct
AEGDTDKLN

SEQ ID NO: 50959 - protein, 12 aa, synthetic construct
AALGSSWDTRQR

SEQ ID NO: 50960 - protein, 11 aa, synthetic construct
AAWKGTGWEKI

SEQ ID NO: 50961 - protein, 11 aa, synthetic construct
AAFYTTGWEKI

SEQ ID NO: 50962 - protein, 9 aa, synthetic construct
AAWWGWEKI

SEQ ID NO: 50963 - protein, 12 aa, synthetic construct
AAWDFATGWEKI

SEQ ID NO: 50964 - protein, 11 aa, synthetic construct
AAWDYTGWEKI

SEQ ID NO: 50965 - protein, 14 aa, synthetic construct
ALGELLPGGYVDKL

SEQ ID NO: 50966 - protein, 12 aa, synthetic construct
ACELLGDDDKLI

SEQ ID NO: 50967 - DNA, 59 bp, synthetic construct
  source 1..59: mol_type = other DNA
taggctatcacagacagggagaatttacatccaccccaactttatacttctaattatcc

SEQ ID NO: 50968 - DNA, 117 bp, synthetic construct
  source 1..117: mol_type = other DNA
cctgaaattccagcttgcagagcacttcctgcctccctgtgaagcagcctgaccttgggatgctgtcactgctccacacatcaacgctggcagtccttggggctcgtaagtagtttt

SEQ ID NO: 50969 - DNA, 123 bp, synthetic construct
  source 1..123: mol_type = other DNA
tctccagaggattcagctgtacttctaactgctcaaatggaaggttatcaacatcagctcgtacgttcgtgggattgtgtccgtgtcgcgaagttcctatactttctagagaataggaacttc

SEQ ID NO: 50970 - DNA, 119 bp, synthetic construct
  source 1..119: mol_type = other DNA
gaagttcctatactttctagagaataggaacttcgttggtacgaacccgggtttgggccccttctcagtgccagtgtcccctcagtgaaaagagaccagcttgtgtactgtcatgtaga

SEQ ID NO: 50971 - DNA, 59 bp, synthetic construct
  source 1..59: mol_type = other DNA
tgcttctacagtgtcctattaatcccactgtgctagcactgggtttccatagtccatgt

SEQ ID NO: 50972 - DNA, 59 bp, synthetic construct
  source 1..59: mol_type = other DNA
ctgcttgccatgctcaggagctgcaataagttcagctcttcgtgtcgctttatgccttc

SEQ ID NO: 50973 - DNA, 139 bp, synthetic construct
  source 1..139: mol_type = other DNA
gagtacctgtcaaatataaactatgctcagcaggtaccagcgcctcacttttatcctttacgcgccatttatcaactcacacctatggggacagctattatcagaaaaacaaaaggcaacaagtattagtagggatgtg

SEQ ID NO: 50974 - DNA, 131 bp, synthetic construct
  source 1..131: mol_type = other DNA
tcagatattctaaggatcactgctatccagagaatcttagagcttgacctaaagctggtaccgtactcatggcaacagcattactgaccatttgaatgtagaagactcatgaattctcccttcctagagac

SEQ ID NO: 50975 - DNA, 138 bp, synthetic construct
  source 1..138: mol_type = other DNA
ctcagagtcatatcgctgcattcactactttctctgtgagttttctatgggattcagcatagctaatatatcttccaacctgagtgtcagcacattcagacttgatccagccagaagctacatttttcagagtcagag

SEQ ID NO: 50976 - DNA, 140 bp, synthetic construct
  source 1..140: mol_type = other DNA
agagagatggtagtcctgtggttgcttcatctgtggtctggatcagaagatttaattctaaataaaagctcatatgtcaatctaattctgtgttgttaaagtaaagatatcaaaggaatagctctactcccatgtttcag

SEQ ID NO: 50977 - DNA, 138 bp, synthetic construct
  source 1..138: mol_type = other DNA
cttctcattgaggtttattctgattgatttccagctttgcccaagggaccctgagttatcttaccagttggcaacccaaaaacatcctataaaatctccagcaggcctttgtttccttgccatcagctcctcttcggc

SEQ ID NO: 50978 - DNA, 139 bp, synthetic construct
  source 1..139: mol_type = other DNA
caattttgtaagagtattgatggaaaatcgttaggcatctacatagccttgatttggctccttggacctctgaccaataaacacaggaaaagatgctctacatcaggagtcaacaaaatatggcccatgagccaaattc

SEQ ID NO: 50979 - DNA, 138 bp, synthetic construct
  source 1..138: mol_type = other DNA
tctgaaccagtcagtaaccttcccatggtagtaatcatgtgagacaggattcagcaggactggctgagattatatcaaagctttcataggggttctataaccacagaatgtagttagttccctgccaagtaaaactta

SEQ ID NO: 50980 - DNA, 138 bp, synthetic construct
  source 1..138: mol_type = other DNA
atccctttggctaagctaactagtatgcgtgcctccttgcaaactgaaaacaagtgtcctacagcttggacgtacggtaccaacgaagttcctattctctagaaagtataggaacttcattctaccgggtaggggagg

SEQ ID NO: 50981 - DNA, 138 bp, synthetic construct
  source 1..138: mol_type = other DNA
cgcgggaagttcctattctctagaaagtataggaacttcgcgacacggacacaatcccacgaacgtacgcctgcacataccttcggctgagctaacgtgtctgcatgcctccttacagagcacaaatctcctacagct

SEQ ID NO: 50982 - DNA, 57 bp, synthetic construct
  source 1..57: mol_type = other DNA
aaacgaaaccaaggtctcaagactgacagcccaaagttactgtcccaggggctccct

SEQ ID NO: 50983 - DNA, 30 bp, synthetic construct
  source 1..30: mol_type = other DNA
ctgctattaactcctgattcagccttctag

SEQ ID NO: 50984 - DNA, 86 bp, synthetic construct
  source 1..86: mol_type = other DNA
aggctggcacactctcactgatagatggctaagcgatacagagagcccagacaaccatttagaggtgaggaattagtagggatgtg

SEQ ID NO: 50985 - DNA, 115 bp, synthetic construct
  source 1..115: mol_type = other DNA
tagccccagaatatccctctgtcaaaacgttctgctagctttgtattaactttaaataattggcattatttaaagttagcagaaagagataaatgcatagttagtgcctgactca

SEQ ID NO: 50986 - DNA, 108 bp, synthetic construct
  source 1..108: mol_type = other DNA
tctagctaaagaaaggggcaagagacaatgaatgctgtggtaccgtacagaaaatgtcgtacggaagttcctatactatttgaagaataggaacttccagagtcagag

SEQ ID NO: 50987 - DNA, 100 bp, synthetic construct
  source 1..100: mol_type = other DNA
acgctgtgatgcgtcttatgctgtgtatcgtgtcatggtacccaaggacatcttgtctgaaacaaactgtaatcgagcactcgaccacggctgtcctctg

SEQ ID NO: 50988 - DNA, 33 bp, synthetic construct
  source 1..33: mol_type = other DNA
actgggttgcatgcttattcagagaactggctt

SEQ ID NO: 50989 - protein, 106 aa, synthetic construct
CVYGAGHLEQPQISSTKTLSKTARLECVVSGITISATSVYWYRERPGEVIQFLVSISYDGTVRKESGIPSGKFEVDRIPETSTSTLTIHNVEKQDIATYYCALWEV

SEQ ID NO: 50990 - protein, 116 aa, synthetic construct
MFIGNSPLLLTVLGLSKVEQFQLSISTEVKKSIDIPCKISSTRFETDVIHWYRQKPNQALEHLIYIVSTKSAARRSMGKTSNKVEARKNSQTLTSILTIKSVEKEDMAVYYCAAWD

SEQ ID NO: 50991 - protein, 103 aa, synthetic construct
LGQLEQPEISISRPANKSAHISWKASIQGFSSKIIHWYWQKPNKGLEYLLHVFLTISAQDCSGGKTKKLEVSKNAHTSTSTLKIKFLEKEDEVVYHCACWIRH

SEQ ID NO: 50992 - protein, 98 aa, synthetic construct
SSVAQKVTQAQSSVSMPVRKAVTLNCLYETSWWSYYIFWYKQLPSKEMIFLIRQGSDEQNAKSGRYSVNFKKAAKSVALTISALQLEDSAKYFCALGE

SEQ ID NO: 50993 - protein, 99 aa, synthetic construct
VMSAIELVPEHQTVPVSIGVPATLRCSMKGEAIGNYYINWYRKTQGNTMTFIYREKDIYGPGFKDNFQGDIDIAKNLAVLKILAPSERDEGSYYCACDT

SEQ ID NO: 50994 - protein, 100 aa, synthetic construct
RGTLCDKVTQSSPDQTVASGSEVVLLCTYDTVYSNPDLFWYRIRPDYSFQFVFYGDNSRSEGADFTQGRFSVKHILTQKAFHLVISPVRTEDSATYYCAF

SEQ ID NO: 50995 - protein, 99 aa, synthetic construct
PGIAQKITQTQPGMFVQEKEAVTLDCTYDTSDPSYGLFWYKQPSSGEMIFLIYQGSYDQQNATEGRYSLNFQKARKSANLVISASQLGDSAMYFCAMRE

SEQ ID NO: 50996 - protein, 100 aa, synthetic construct
VNSQQKNDQQVKQNSPSLSVQEGRISILNCDYTNSMFDYFLWYKKYPAEGPTFLISISSIKDKNEDGRFTVFLNKSAKHLSLHIVPSQPGDSAVYFCAAS

SEQ ID NO: 50997 - protein, 102 aa, synthetic construct
VSGQQKEKSDQQQVKQSPQSLIVQKGGISIINCAYENTAFDYFPWYQQFPGKGPALLIAIRPDVSEKKEGRFTISFNKSAKQFSSHIMDSQPGDSATYFCAA

SEQ ID NO: 50998 - protein, 95 aa, synthetic construct
VSSEDKVVQSPLSLVVHEGDTVTLNCSYEVTNFRSLLWYKQEKKAPTFLFMLTSSGIEKKSGRLSSILDKKELFSILNITATQTGDSAIYLCAVE

SEQ ID NO: 50999 - protein, 99 aa, synthetic construct
FSMAQTVTQSQPEMSVQEAETVTLSCTYDTSESDYYLFWYKQPPSRQMILVIRQEAYKQQNATENRFSVNFQKAAKSFSLKISDSQLGDAAMYFCAYRS

SEQ ID NO: 51000 - protein, 153 aa, synthetic construct
  VARIANT 1: note = X can be any amino acid
XSQPPAKPSVFIMKNGTNVACLVKDFYPKEVTISLRSSKKIVEFDPAIVISPSGKYSAVKLGQYGDSNSVTCSVQHNSETVHSTDFEPYANSFNNEKLPEPENDTQISEPCYGPRVTVHTEKVNMMSLTVLGLRLLFAKTIAINFLLTVKLFF

SEQ ID NO: 51001 - protein, 190 aa, synthetic construct
  VARIANT 1: note = X can be any amino acid
XKRTDSDFSPKPTIFLPSAAETNLHKAGTYLCLLEKFFPEVIRVYWKEKDGEKILESQEGNTIKTNDRYMKFSWLTVTEDSMAKEHSCIVKHENNKRGVDQEILFPPIGKAFTTINVNPRDSVLRHENVNNATDLEDCMKGRKDMLQLQVTTTYAFYTYLILFFKSMVHLAFVVFCLFRRAAMSCDDQRS

SEQ ID NO: 51002 - DNA, 25 bp, synthetic construct
  source 1..25: mol_type = other DNA
gtcagtcgagtgcacagtttcactg

SEQ ID NO: 51003 - DNA, 24 bp, synthetic construct
  source 1..24: mol_type = other DNA
cccagtcatcagtatccatgccag

SEQ ID NO: 51004 - DNA, 24 bp, synthetic construct
  source 1..24: mol_type = other DNA
tgaacaccaaacagtgcctgtgtc

SEQ ID NO: 51005 - DNA, 25 bp, synthetic construct
  source 1..25: mol_type = other DNA
gttccccggaccagacggtggcgag

SEQ ID NO: 51006 - DNA, 24 bp, synthetic construct
  source 1..24: mol_type = other DNA
acccaaccaggaatgttcgtgcag

SEQ ID NO: 51007 - DNA, 27 bp, synthetic construct
  source 1..27: mol_type = other DNA
aacagtcaacagaagaatgatgaccag

SEQ ID NO: 51008 - DNA, 24 bp, synthetic construct
  source 1..24: mol_type = other DNA
gagaaaagtgaccagcagcaggtg

SEQ ID NO: 51009 - DNA, 26 bp, synthetic construct
  source 1..26: mol_type = other DNA
tgaagacaaggtggtacaaagccctc

SEQ ID NO: 51010 - DNA, 26 bp, synthetic construct
  source 1..26: mol_type = other DNA
agacagtcactcagtctcaaccagag

SEQ ID NO: 51011 - DNA, 26 bp, synthetic construct
  source 1..26: mol_type = other DNA
catactgaccaagcttgacagcactg

SEQ ID NO: 51012 - DNA, 26 bp, synthetic construct
  source 1..26: mol_type = other DNA
tgcctgtatgaaacaagttggtggtc

SEQ ID NO: 51013 - DNA, 25 bp, synthetic construct
  source 1..25: mol_type = other DNA
ggtacaggaagacccaaggtaacac

SEQ ID NO: 51014 - DNA, 25 bp, synthetic construct
  source 1..25: mol_type = other DNA
ggtggtactgctctgcacttacgac

SEQ ID NO: 51015 - DNA, 25 bp, synthetic construct
  source 1..25: mol_type = other DNA
ttctggtacaagcagcccagcagtg

SEQ ID NO: 51016 - DNA, 23 bp, synthetic construct
  source 1..23: mol_type = other DNA
accatccctgagcgtccaggaag

SEQ ID NO: 51017 - DNA, 25 bp, synthetic construct
  source 1..25: mol_type = other DNA
tgcttatgagaacactgcgtttgac

SEQ ID NO: 51018 - DNA, 24 bp, synthetic construct
  source 1..24: mol_type = other DNA
tccacgagggagacaccgtaactc

SEQ ID NO: 51019 - DNA, 25 bp, synthetic construct
  source 1..25: mol_type = other DNA
tgcacatatgacaccagtgagagtg

SEQ ID NO: 51020 - DNA, 24 bp, synthetic construct
  source 1..24: mol_type = other DNA
ccctttcaggcactgtaagccagc

SEQ ID NO: 51021 - DNA, 24 bp, synthetic construct
  source 1..24: mol_type = other DNA
cttgctgaaggaagtaacggctac

SEQ ID NO: 51022 - DNA, 24 bp, synthetic construct
  source 1..24: mol_type = other DNA
cttactgtaacaaataccttctac

SEQ ID NO: 51023 - DNA, 25 bp, synthetic construct
  source 1..25: mol_type = other DNA
tcttgctgaaggaagtaccggctac

SEQ ID NO: 51024 - DNA, 24 bp, synthetic construct
  source 1..24: mol_type = other DNA
tgtgaccttactgtaataaatgcc

SEQ ID NO: 51025 - DNA, 25 bp, synthetic construct
  source 1..25: mol_type = other DNA
tgatcttcctgtagaaaatgccgtc

SEQ ID NO: 51026 - DNA, 24 bp, synthetic construct
  source 1..24: mol_type = other DNA
ccccttcctgggagtccaggatag

SEQ ID NO: 51027 - DNA, 24 bp, synthetic construct
  source 1..24: mol_type = other DNA
actatgactcctacaactccaagg

SEQ ID NO: 51028 - DNA, 25 bp, synthetic construct
  source 1..25: mol_type = other DNA
tactatgacgtctccaccgcaaggg

SEQ ID NO: 51029 - DNA, 24 bp, synthetic construct
  source 1..24: mol_type = other DNA
actatgactcctacacctccagcg

SEQ ID NO: 51030 - DNA, 24 bp, synthetic construct
  source 1..24: mol_type = other DNA
actatgacgtctccaactcaaagg

SEQ ID NO: 51031 - DNA, 26 bp, synthetic construct
  source 1..26: mol_type = other DNA
aagtatcatacttatgcaagcacagg

SEQ ID NO: 51032 - protein, 117 aa, synthetic construct
MFIGNSPLLLTVGLGLSKVEQFQLSISTEVKKSIDIPCKISSTRFETDVIHWYRQKPNQALEHLIYIVSTKSAARRSMGKTSNKVEARKNSQTLTSILTIKSVEKEDMAVYYCAAWD

SEQ ID NO: 51033 - protein, 101 aa, synthetic construct
VNSQQKNDDQQVKQNSPSLSVQEGRISILNCDYTNSMFDYFLWYKKYPAEGPTFLISISSIKDKNEDGRFTVFLNKSAKHLSLHIVPSQPGDSAVYFCAAS

SEQ ID NO: 51034 - protein, 4 aa, synthetic construct
ACDS

SEQ ID NO: 51035 - protein, 5 aa, synthetic construct
GDNSR

SEQ ID NO: 51036 - protein, 12 aa, synthetic construct
ACDTVGDTDKLI
